United States Patent Application Publication US 2026/0337819 A1, published October 29, 2026 (application 19/115,024).

The application's sequence listing, which the Patent Office published only in electronic form, follows.

SEQUENCE LISTING (3440 sequences)

SEQ ID NO: 1 - DNA, 30 bp, Bacillus subtilis
  source 1..30: mol_type = genomic DNA
gaacacaacccggttgtaatggttcatggt

SEQ ID NO: 2 - DNA, 30 bp, synthetic construct
  source 1..30: mol_type = other DNA
attcacaacccggttgtaatggttcatggt

SEQ ID NO: 3 - DNA, 30 bp, synthetic construct
  source 1..30: mol_type = other DNA
atgcacaacccggttgtaatggttcatggt

SEQ ID NO: 4 - DNA, 30 bp, synthetic construct
  source 1..30: mol_type = other DNA
acccacaacccggttgtaatggttcatggt

SEQ ID NO: 5 - DNA, 30 bp, synthetic construct
  source 1..30: mol_type = other DNA
aaccacaacccggttgtaatggttcatggt

SEQ ID NO: 6 - DNA, 30 bp, synthetic construct
  source 1..30: mol_type = other DNA
aaacacaacccggttgtaatggttcatggt

SEQ ID NO: 7 - DNA, 30 bp, synthetic construct
  source 1..30: mol_type = other DNA
agccacaacccggttgtaatggttcatggt

SEQ ID NO: 8 - DNA, 30 bp, synthetic construct
  source 1..30: mol_type = other DNA
cgtcacaacccggttgtaatggttcatggt

SEQ ID NO: 9 - DNA, 30 bp, synthetic construct
  source 1..30: mol_type = other DNA
ctgcacaacccggttgtaatggttcatggt

SEQ ID NO: 10 - DNA, 30 bp, synthetic construct
  source 1..30: mol_type = other DNA
ccgcacaacccggttgtaatggttcatggt

SEQ ID NO: 11 - DNA, 30 bp, synthetic construct
  source 1..30: mol_type = other DNA
catcacaacccggttgtaatggttcatggt

SEQ ID NO: 12 - DNA, 30 bp, synthetic construct
  source 1..30: mol_type = other DNA
cagcacaacccggttgtaatggttcatggt

SEQ ID NO: 13 - DNA, 30 bp, synthetic construct
  source 1..30: mol_type = other DNA
gtgcacaacccggttgtaatggttcatggt

SEQ ID NO: 14 - DNA, 30 bp, synthetic construct
  source 1..30: mol_type = other DNA
gcgcacaacccggttgtaatggttcatggt

SEQ ID NO: 15 - DNA, 30 bp, synthetic construct
  source 1..30: mol_type = other DNA
gatcacaacccggttgtaatggttcatggt

SEQ ID NO: 16 - DNA, 30 bp, synthetic construct
  source 1..30: mol_type = other DNA
ggccacaacccggttgtaatggttcatggt

SEQ ID NO: 17 - DNA, 30 bp, synthetic construct
  source 1..30: mol_type = other DNA
tttcacaacccggttgtaatggttcatggt

SEQ ID NO: 18 - DNA, 30 bp, synthetic construct
  source 1..30: mol_type = other DNA
tatcacaacccggttgtaatggttcatggt

SEQ ID NO: 19 - DNA, 30 bp, synthetic construct
  source 1..30: mol_type = other DNA
tgccacaacccggttgtaatggttcatggt

SEQ ID NO: 20 - DNA, 30 bp, synthetic construct
  source 1..30: mol_type = other DNA
tggcacaacccggttgtaatggttcatggt

SEQ ID NO: 21 - DNA, 30 bp, synthetic construct
  source 1..30: mol_type = other DNA
gaaattaacccggttgtaatggttcatggt

SEQ ID NO: 22 - DNA, 30 bp, synthetic construct
  source 1..30: mol_type = other DNA
gaaatgaacccggttgtaatggttcatggt

SEQ ID NO: 23 - DNA, 30 bp, synthetic construct
  source 1..30: mol_type = other DNA
gaaaccaacccggttgtaatggttcatggt

SEQ ID NO: 24 - DNA, 30 bp, synthetic construct
  source 1..30: mol_type = other DNA
gaaaacaacccggttgtaatggttcatggt

SEQ ID NO: 25 - DNA, 30 bp, synthetic construct
  source 1..30: mol_type = other DNA
gaaaaaaacccggttgtaatggttcatggt

SEQ ID NO: 26 - DNA, 30 bp, synthetic construct
  source 1..30: mol_type = other DNA
gaaagcaacccggttgtaatggttcatggt

SEQ ID NO: 27 - DNA, 30 bp, synthetic construct
  source 1..30: mol_type = other DNA
gaacgtaacccggttgtaatggttcatggt

SEQ ID NO: 28 - DNA, 30 bp, synthetic construct
  source 1..30: mol_type = other DNA
gaactgaacccggttgtaatggttcatggt

SEQ ID NO: 29 - DNA, 30 bp, synthetic construct
  source 1..30: mol_type = other DNA
gaaccgaacccggttgtaatggttcatggt

SEQ ID NO: 30 - DNA, 30 bp, synthetic construct
  source 1..30: mol_type = other DNA
gaacagaacccggttgtaatggttcatggt

SEQ ID NO: 31 - DNA, 30 bp, synthetic construct
  source 1..30: mol_type = other DNA
gaagtgaacccggttgtaatggttcatggt

SEQ ID NO: 32 - DNA, 30 bp, synthetic construct
  source 1..30: mol_type = other DNA
gaagcgaacccggttgtaatggttcatggt

SEQ ID NO: 33 - DNA, 30 bp, synthetic construct
  source 1..30: mol_type = other DNA
gaagataacccggttgtaatggttcatggt

SEQ ID NO: 34 - DNA, 30 bp, synthetic construct
  source 1..30: mol_type = other DNA
gaagaaaacccggttgtaatggttcatggt

SEQ ID NO: 35 - DNA, 30 bp, synthetic construct
  source 1..30: mol_type = other DNA
gaaggcaacccggttgtaatggttcatggt

SEQ ID NO: 36 - DNA, 30 bp, synthetic construct
  source 1..30: mol_type = other DNA
gaatttaacccggttgtaatggttcatggt

SEQ ID NO: 37 - DNA, 30 bp, synthetic construct
  source 1..30: mol_type = other DNA
gaatataacccggttgtaatggttcatggt

SEQ ID NO: 38 - DNA, 30 bp, synthetic construct
  source 1..30: mol_type = other DNA
gaatgcaacccggttgtaatggttcatggt

SEQ ID NO: 39 - DNA, 30 bp, synthetic construct
  source 1..30: mol_type = other DNA
gaatggaacccggttgtaatggttcatggt

SEQ ID NO: 40 - DNA, 30 bp, synthetic construct
  source 1..30: mol_type = other DNA
gaacacattccggttgtaatggttcatggt

SEQ ID NO: 41 - DNA, 30 bp, synthetic construct
  source 1..30: mol_type = other DNA
gaacacatgccggttgtaatggttcatggt

SEQ ID NO: 42 - DNA, 30 bp, synthetic construct
  source 1..30: mol_type = other DNA
gaacacaccccggttgtaatggttcatggt

SEQ ID NO: 43 - DNA, 30 bp, synthetic construct
  source 1..30: mol_type = other DNA
gaacacaaaccggttgtaatggttcatggt

SEQ ID NO: 44 - DNA, 30 bp, synthetic construct
  source 1..30: mol_type = other DNA
gaacacagcccggttgtaatggttcatggt

SEQ ID NO: 45 - DNA, 30 bp, synthetic construct
  source 1..30: mol_type = other DNA
gaacaccgtccggttgtaatggttcatggt

SEQ ID NO: 46 - DNA, 30 bp, synthetic construct
  source 1..30: mol_type = other DNA
gaacacctgccggttgtaatggttcatggt

SEQ ID NO: 47 - DNA, 30 bp, synthetic construct
  source 1..30: mol_type = other DNA
gaacacccgccggttgtaatggttcatggt

SEQ ID NO: 48 - DNA, 30 bp, synthetic construct
  source 1..30: mol_type = other DNA
gaacaccatccggttgtaatggttcatggt

SEQ ID NO: 49 - DNA, 30 bp, synthetic construct
  source 1..30: mol_type = other DNA
gaacaccagccggttgtaatggttcatggt

SEQ ID NO: 50 - DNA, 30 bp, synthetic construct
  source 1..30: mol_type = other DNA
gaacacgtgccggttgtaatggttcatggt

SEQ ID NO: 51 - DNA, 30 bp, synthetic construct
  source 1..30: mol_type = other DNA
gaacacgcgccggttgtaatggttcatggt

SEQ ID NO: 52 - DNA, 30 bp, synthetic construct
  source 1..30: mol_type = other DNA
gaacacgatccggttgtaatggttcatggt

SEQ ID NO: 53 - DNA, 30 bp, synthetic construct
  source 1..30: mol_type = other DNA
gaacacgaaccggttgtaatggttcatggt

SEQ ID NO: 54 - DNA, 30 bp, synthetic construct
  source 1..30: mol_type = other DNA
gaacacggcccggttgtaatggttcatggt

SEQ ID NO: 55 - DNA, 30 bp, synthetic construct
  source 1..30: mol_type = other DNA
gaacactttccggttgtaatggttcatggt

SEQ ID NO: 56 - DNA, 30 bp, synthetic construct
  source 1..30: mol_type = other DNA
gaacactatccggttgtaatggttcatggt

SEQ ID NO: 57 - DNA, 30 bp, synthetic construct
  source 1..30: mol_type = other DNA
gaacactgcccggttgtaatggttcatggt

SEQ ID NO: 58 - DNA, 30 bp, synthetic construct
  source 1..30: mol_type = other DNA
gaacactggccggttgtaatggttcatggt

SEQ ID NO: 59 - DNA, 30 bp, synthetic construct
  source 1..30: mol_type = other DNA
gaacacaacattgttgtaatggttcatggt

SEQ ID NO: 60 - DNA, 30 bp, synthetic construct
  source 1..30: mol_type = other DNA
gaacacaacatggttgtaatggttcatggt

SEQ ID NO: 61 - DNA, 30 bp, synthetic construct
  source 1..30: mol_type = other DNA
gaacacaacaccgttgtaatggttcatggt

SEQ ID NO: 62 - DNA, 30 bp, synthetic construct
  source 1..30: mol_type = other DNA
gaacacaacaacgttgtaatggttcatggt

SEQ ID NO: 63 - DNA, 30 bp, synthetic construct
  source 1..30: mol_type = other DNA
gaacacaacaaagttgtaatggttcatggt

SEQ ID NO: 64 - DNA, 30 bp, synthetic construct
  source 1..30: mol_type = other DNA
gaacacaacagcgttgtaatggttcatggt

SEQ ID NO: 65 - DNA, 30 bp, synthetic construct
  source 1..30: mol_type = other DNA
gaacacaaccgtgttgtaatggttcatggt

SEQ ID NO: 66 - DNA, 30 bp, synthetic construct
  source 1..30: mol_type = other DNA
gaacacaacctggttgtaatggttcatggt

SEQ ID NO: 67 - DNA, 30 bp, synthetic construct
  source 1..30: mol_type = other DNA
gaacacaaccatgttgtaatggttcatggt

SEQ ID NO: 68 - DNA, 30 bp, synthetic construct
  source 1..30: mol_type = other DNA
gaacacaaccaggttgtaatggttcatggt

SEQ ID NO: 69 - DNA, 30 bp, synthetic construct
  source 1..30: mol_type = other DNA
gaacacaacgtggttgtaatggttcatggt

SEQ ID NO: 70 - DNA, 30 bp, synthetic construct
  source 1..30: mol_type = other DNA
gaacacaacgcggttgtaatggttcatggt

SEQ ID NO: 71 - DNA, 30 bp, synthetic construct
  source 1..30: mol_type = other DNA
gaacacaacgatgttgtaatggttcatggt

SEQ ID NO: 72 - DNA, 30 bp, synthetic construct
  source 1..30: mol_type = other DNA
gaacacaacgaagttgtaatggttcatggt

SEQ ID NO: 73 - DNA, 30 bp, synthetic construct
  source 1..30: mol_type = other DNA
gaacacaacggcgttgtaatggttcatggt

SEQ ID NO: 74 - DNA, 30 bp, synthetic construct
  source 1..30: mol_type = other DNA
gaacacaactttgttgtaatggttcatggt

SEQ ID NO: 75 - DNA, 30 bp, synthetic construct
  source 1..30: mol_type = other DNA
gaacacaactatgttgtaatggttcatggt

SEQ ID NO: 76 - DNA, 30 bp, synthetic construct
  source 1..30: mol_type = other DNA
gaacacaactgcgttgtaatggttcatggt

SEQ ID NO: 77 - DNA, 30 bp, synthetic construct
  source 1..30: mol_type = other DNA
gaacacaactgggttgtaatggttcatggt

SEQ ID NO: 78 - DNA, 30 bp, synthetic construct
  source 1..30: mol_type = other DNA
gaacacaacccgattgtaatggttcatggt

SEQ ID NO: 79 - DNA, 30 bp, synthetic construct
  source 1..30: mol_type = other DNA
gaacacaacccgatggtaatggttcatggt

SEQ ID NO: 80 - DNA, 30 bp, synthetic construct
  source 1..30: mol_type = other DNA
gaacacaacccgaccgtaatggttcatggt

SEQ ID NO: 81 - DNA, 30 bp, synthetic construct
  source 1..30: mol_type = other DNA
gaacacaacccgaacgtaatggttcatggt

SEQ ID NO: 82 - DNA, 30 bp, synthetic construct
  source 1..30: mol_type = other DNA
gaacacaacccgaaagtaatggttcatggt

SEQ ID NO: 83 - DNA, 30 bp, synthetic construct
  source 1..30: mol_type = other DNA
gaacacaacccgagcgtaatggttcatggt

SEQ ID NO: 84 - DNA, 30 bp, synthetic construct
  source 1..30: mol_type = other DNA
gaacacaacccgcgtgtaatggttcatggt

SEQ ID NO: 85 - DNA, 30 bp, synthetic construct
  source 1..30: mol_type = other DNA
gaacacaacccgctggtaatggttcatggt

SEQ ID NO: 86 - DNA, 30 bp, synthetic construct
  source 1..30: mol_type = other DNA
gaacacaacccgccggtaatggttcatggt

SEQ ID NO: 87 - DNA, 30 bp, synthetic construct
  source 1..30: mol_type = other DNA
gaacacaacccgcatgtaatggttcatggt

SEQ ID NO: 88 - DNA, 30 bp, synthetic construct
  source 1..30: mol_type = other DNA
gaacacaacccgcaggtaatggttcatggt

SEQ ID NO: 89 - DNA, 30 bp, synthetic construct
  source 1..30: mol_type = other DNA
gaacacaacccggcggtaatggttcatggt

SEQ ID NO: 90 - DNA, 30 bp, synthetic construct
  source 1..30: mol_type = other DNA
gaacacaacccggatgtaatggttcatggt

SEQ ID NO: 91 - DNA, 30 bp, synthetic construct
  source 1..30: mol_type = other DNA
gaacacaacccggaagtaatggttcatggt

SEQ ID NO: 92 - DNA, 30 bp, synthetic construct
  source 1..30: mol_type = other DNA
gaacacaacccgggcgtaatggttcatggt

SEQ ID NO: 93 - DNA, 30 bp, synthetic construct
  source 1..30: mol_type = other DNA
gaacacaacccgtttgtaatggttcatggt

SEQ ID NO: 94 - DNA, 30 bp, synthetic construct
  source 1..30: mol_type = other DNA
gaacacaacccgtatgtaatggttcatggt

SEQ ID NO: 95 - DNA, 30 bp, synthetic construct
  source 1..30: mol_type = other DNA
gaacacaacccgtgcgtaatggttcatggt

SEQ ID NO: 96 - DNA, 30 bp, synthetic construct
  source 1..30: mol_type = other DNA
gaacacaacccgtgggtaatggttcatggt

SEQ ID NO: 97 - DNA, 30 bp, synthetic construct
  source 1..30: mol_type = other DNA
gaacacaacccggttattatggttcatggt

SEQ ID NO: 98 - DNA, 30 bp, synthetic construct
  source 1..30: mol_type = other DNA
gaacacaacccggttatgatggttcatggt

SEQ ID NO: 99 - DNA, 30 bp, synthetic construct
  source 1..30: mol_type = other DNA
gaacacaacccggttaccatggttcatggt

SEQ ID NO: 100 - DNA, 30 bp, synthetic construct
  source 1..30: mol_type = other DNA
gaacacaacccggttaacatggttcatggt

SEQ ID NO: 101 - DNA, 30 bp, synthetic construct
  source 1..30: mol_type = other DNA
gaacacaacccggttaaaatggttcatggt

SEQ ID NO: 102 - DNA, 30 bp, synthetic construct
  source 1..30: mol_type = other DNA
gaacacaacccggttagcatggttcatggt

SEQ ID NO: 103 - DNA, 30 bp, synthetic construct
  source 1..30: mol_type = other DNA
gaacacaacccggttcgtatggttcatggt

SEQ ID NO: 104 - DNA, 30 bp, synthetic construct
  source 1..30: mol_type = other DNA
gaacacaacccggttctgatggttcatggt

SEQ ID NO: 105 - DNA, 30 bp, synthetic construct
  source 1..30: mol_type = other DNA
gaacacaacccggttccgatggttcatggt

SEQ ID NO: 106 - DNA, 30 bp, synthetic construct
  source 1..30: mol_type = other DNA
gaacacaacccggttcatatggttcatggt

SEQ ID NO: 107 - DNA, 30 bp, synthetic construct
  source 1..30: mol_type = other DNA
gaacacaacccggttcagatggttcatggt

SEQ ID NO: 108 - DNA, 30 bp, synthetic construct
  source 1..30: mol_type = other DNA
gaacacaacccggttgcgatggttcatggt

SEQ ID NO: 109 - DNA, 30 bp, synthetic construct
  source 1..30: mol_type = other DNA
gaacacaacccggttgatatggttcatggt

SEQ ID NO: 110 - DNA, 30 bp, synthetic construct
  source 1..30: mol_type = other DNA
gaacacaacccggttgaaatggttcatggt

SEQ ID NO: 111 - DNA, 30 bp, synthetic construct
  source 1..30: mol_type = other DNA
gaacacaacccggttggcatggttcatggt

SEQ ID NO: 112 - DNA, 30 bp, synthetic construct
  source 1..30: mol_type = other DNA
gaacacaacccggtttttatggttcatggt

SEQ ID NO: 113 - DNA, 30 bp, synthetic construct
  source 1..30: mol_type = other DNA
gaacacaacccggtttatatggttcatggt

SEQ ID NO: 114 - DNA, 30 bp, synthetic construct
  source 1..30: mol_type = other DNA
gaacacaacccggtttgcatggttcatggt

SEQ ID NO: 115 - DNA, 30 bp, synthetic construct
  source 1..30: mol_type = other DNA
gaacacaacccggtttggatggttcatggt

SEQ ID NO: 116 - DNA, 30 bp, synthetic construct
  source 1..30: mol_type = other DNA
gaacacaacccggttgtaattgttcatggt

SEQ ID NO: 117 - DNA, 30 bp, synthetic construct
  source 1..30: mol_type = other DNA
gaacacaacccggttgtaaccgttcatggt

SEQ ID NO: 118 - DNA, 30 bp, synthetic construct
  source 1..30: mol_type = other DNA
gaacacaacccggttgtaaacgttcatggt

SEQ ID NO: 119 - DNA, 30 bp, synthetic construct
  source 1..30: mol_type = other DNA
gaacacaacccggttgtaaaagttcatggt

SEQ ID NO: 120 - DNA, 30 bp, synthetic construct
  source 1..30: mol_type = other DNA
gaacacaacccggttgtaagcgttcatggt

SEQ ID NO: 121 - DNA, 30 bp, synthetic construct
  source 1..30: mol_type = other DNA
gaacacaacccggttgtacgtgttcatggt

SEQ ID NO: 122 - DNA, 30 bp, synthetic construct
  source 1..30: mol_type = other DNA
gaacacaacccggttgtactggttcatggt

SEQ ID NO: 123 - DNA, 30 bp, synthetic construct
  source 1..30: mol_type = other DNA
gaacacaacccggttgtaccggttcatggt

SEQ ID NO: 124 - DNA, 30 bp, synthetic construct
  source 1..30: mol_type = other DNA
gaacacaacccggttgtacatgttcatggt

SEQ ID NO: 125 - DNA, 30 bp, synthetic construct
  source 1..30: mol_type = other DNA
gaacacaacccggttgtacaggttcatggt

SEQ ID NO: 126 - DNA, 30 bp, synthetic construct
  source 1..30: mol_type = other DNA
gaacacaacccggttgtagtggttcatggt

SEQ ID NO: 127 - DNA, 30 bp, synthetic construct
  source 1..30: mol_type = other DNA
gaacacaacccggttgtagcggttcatggt

SEQ ID NO: 128 - DNA, 30 bp, synthetic construct
  source 1..30: mol_type = other DNA
gaacacaacccggttgtagatgttcatggt

SEQ ID NO: 129 - DNA, 30 bp, synthetic construct
  source 1..30: mol_type = other DNA
gaacacaacccggttgtagaagttcatggt

SEQ ID NO: 130 - DNA, 30 bp, synthetic construct
  source 1..30: mol_type = other DNA
gaacacaacccggttgtaggcgttcatggt

SEQ ID NO: 131 - DNA, 30 bp, synthetic construct
  source 1..30: mol_type = other DNA
gaacacaacccggttgtatttgttcatggt

SEQ ID NO: 132 - DNA, 30 bp, synthetic construct
  source 1..30: mol_type = other DNA
gaacacaacccggttgtatatgttcatggt

SEQ ID NO: 133 - DNA, 30 bp, synthetic construct
  source 1..30: mol_type = other DNA
gaacacaacccggttgtatgcgttcatggt

SEQ ID NO: 134 - DNA, 30 bp, synthetic construct
  source 1..30: mol_type = other DNA
gaacacaacccggttgtatgggttcatggt

SEQ ID NO: 135 - DNA, 30 bp, synthetic construct
  source 1..30: mol_type = other DNA
gaacacaacccggttgtaatgattcatggt

SEQ ID NO: 136 - DNA, 30 bp, synthetic construct
  source 1..30: mol_type = other DNA
gaacacaacccggttgtaatgatgcatggt

SEQ ID NO: 137 - DNA, 30 bp, synthetic construct
  source 1..30: mol_type = other DNA
gaacacaacccggttgtaatgacccatggt

SEQ ID NO: 138 - DNA, 30 bp, synthetic construct
  source 1..30: mol_type = other DNA
gaacacaacccggttgtaatgaaccatggt

SEQ ID NO: 139 - DNA, 30 bp, synthetic construct
  source 1..30: mol_type = other DNA
gaacacaacccggttgtaatgaaacatggt

SEQ ID NO: 140 - DNA, 30 bp, synthetic construct
  source 1..30: mol_type = other DNA
gaacacaacccggttgtaatgagccatggt

SEQ ID NO: 141 - DNA, 30 bp, synthetic construct
  source 1..30: mol_type = other DNA
gaacacaacccggttgtaatgcgtcatggt

SEQ ID NO: 142 - DNA, 30 bp, synthetic construct
  source 1..30: mol_type = other DNA
gaacacaacccggttgtaatgctgcatggt

SEQ ID NO: 143 - DNA, 30 bp, synthetic construct
  source 1..30: mol_type = other DNA
gaacacaacccggttgtaatgccgcatggt

SEQ ID NO: 144 - DNA, 30 bp, synthetic construct
  source 1..30: mol_type = other DNA
gaacacaacccggttgtaatgcatcatggt

SEQ ID NO: 145 - DNA, 30 bp, synthetic construct
  source 1..30: mol_type = other DNA
gaacacaacccggttgtaatgcagcatggt

SEQ ID NO: 146 - DNA, 30 bp, synthetic construct
  source 1..30: mol_type = other DNA
gaacacaacccggttgtaatggcgcatggt

SEQ ID NO: 147 - DNA, 30 bp, synthetic construct
  source 1..30: mol_type = other DNA
gaacacaacccggttgtaatggatcatggt

SEQ ID NO: 148 - DNA, 30 bp, synthetic construct
  source 1..30: mol_type = other DNA
gaacacaacccggttgtaatggaacatggt

SEQ ID NO: 149 - DNA, 30 bp, synthetic construct
  source 1..30: mol_type = other DNA
gaacacaacccggttgtaatgggccatggt

SEQ ID NO: 150 - DNA, 30 bp, synthetic construct
  source 1..30: mol_type = other DNA
gaacacaacccggttgtaatgtttcatggt

SEQ ID NO: 151 - DNA, 30 bp, synthetic construct
  source 1..30: mol_type = other DNA
gaacacaacccggttgtaatgtatcatggt

SEQ ID NO: 152 - DNA, 30 bp, synthetic construct
  source 1..30: mol_type = other DNA
gaacacaacccggttgtaatgtgccatggt

SEQ ID NO: 153 - DNA, 30 bp, synthetic construct
  source 1..30: mol_type = other DNA
gaacacaacccggttgtaatgtggcatggt

SEQ ID NO: 154 - DNA, 30 bp, synthetic construct
  source 1..30: mol_type = other DNA
gaacacaacccggttgtaatggttattggt

SEQ ID NO: 155 - DNA, 30 bp, synthetic construct
  source 1..30: mol_type = other DNA
gaacacaacccggttgtaatggttatgggt

SEQ ID NO: 156 - DNA, 30 bp, synthetic construct
  source 1..30: mol_type = other DNA
gaacacaacccggttgtaatggttaccggt

SEQ ID NO: 157 - DNA, 30 bp, synthetic construct
  source 1..30: mol_type = other DNA
gaacacaacccggttgtaatggttaacggt

SEQ ID NO: 158 - DNA, 30 bp, synthetic construct
  source 1..30: mol_type = other DNA
gaacacaacccggttgtaatggttaaaggt

SEQ ID NO: 159 - DNA, 30 bp, synthetic construct
  source 1..30: mol_type = other DNA
gaacacaacccggttgtaatggttagcggt

SEQ ID NO: 160 - DNA, 30 bp, synthetic construct
  source 1..30: mol_type = other DNA
gaacacaacccggttgtaatggttcgtggt

SEQ ID NO: 161 - DNA, 30 bp, synthetic construct
  source 1..30: mol_type = other DNA
gaacacaacccggttgtaatggttctgggt

SEQ ID NO: 162 - DNA, 30 bp, synthetic construct
  source 1..30: mol_type = other DNA
gaacacaacccggttgtaatggttccgggt

SEQ ID NO: 163 - DNA, 30 bp, synthetic construct
  source 1..30: mol_type = other DNA
gaacacaacccggttgtaatggttcagggt

SEQ ID NO: 164 - DNA, 30 bp, synthetic construct
  source 1..30: mol_type = other DNA
gaacacaacccggttgtaatggttgtgggt

SEQ ID NO: 165 - DNA, 30 bp, synthetic construct
  source 1..30: mol_type = other DNA
gaacacaacccggttgtaatggttgcgggt

SEQ ID NO: 166 - DNA, 30 bp, synthetic construct
  source 1..30: mol_type = other DNA
gaacacaacccggttgtaatggttgatggt

SEQ ID NO: 167 - DNA, 30 bp, synthetic construct
  source 1..30: mol_type = other DNA
gaacacaacccggttgtaatggttgaaggt

SEQ ID NO: 168 - DNA, 30 bp, synthetic construct
  source 1..30: mol_type = other DNA
gaacacaacccggttgtaatggttggcggt

SEQ ID NO: 169 - DNA, 30 bp, synthetic construct
  source 1..30: mol_type = other DNA
gaacacaacccggttgtaatggtttttggt

SEQ ID NO: 170 - DNA, 30 bp, synthetic construct
  source 1..30: mol_type = other DNA
gaacacaacccggttgtaatggtttatggt

SEQ ID NO: 171 - DNA, 30 bp, synthetic construct
  source 1..30: mol_type = other DNA
gaacacaacccggttgtaatggtttgcggt

SEQ ID NO: 172 - DNA, 30 bp, synthetic construct
  source 1..30: mol_type = other DNA
gaacacaacccggttgtaatggtttggggt

SEQ ID NO: 173 - DNA, 30 bp, synthetic construct
  source 1..30: mol_type = other DNA
gaacacaacccggttgtaatggttcatatt

SEQ ID NO: 174 - DNA, 30 bp, synthetic construct
  source 1..30: mol_type = other DNA
gaacacaacccggttgtaatggttcatatg

SEQ ID NO: 175 - DNA, 30 bp, synthetic construct
  source 1..30: mol_type = other DNA
gaacacaacccggttgtaatggttcatacc

SEQ ID NO: 176 - DNA, 30 bp, synthetic construct
  source 1..30: mol_type = other DNA
gaacacaacccggttgtaatggttcataac

SEQ ID NO: 177 - DNA, 30 bp, synthetic construct
  source 1..30: mol_type = other DNA
gaacacaacccggttgtaatggttcataaa

SEQ ID NO: 178 - DNA, 30 bp, synthetic construct
  source 1..30: mol_type = other DNA
gaacacaacccggttgtaatggttcatagc

SEQ ID NO: 179 - DNA, 30 bp, synthetic construct
  source 1..30: mol_type = other DNA
gaacacaacccggttgtaatggttcatcgt

SEQ ID NO: 180 - DNA, 30 bp, synthetic construct
  source 1..30: mol_type = other DNA
gaacacaacccggttgtaatggttcatctg

SEQ ID NO: 181 - DNA, 30 bp, synthetic construct
  source 1..30: mol_type = other DNA
gaacacaacccggttgtaatggttcatccg

SEQ ID NO: 182 - DNA, 30 bp, synthetic construct
  source 1..30: mol_type = other DNA
gaacacaacccggttgtaatggttcatcat

SEQ ID NO: 183 - DNA, 30 bp, synthetic construct
  source 1..30: mol_type = other DNA
gaacacaacccggttgtaatggttcatcag

SEQ ID NO: 184 - DNA, 30 bp, synthetic construct
  source 1..30: mol_type = other DNA
gaacacaacccggttgtaatggttcatgtg

SEQ ID NO: 185 - DNA, 30 bp, synthetic construct
  source 1..30: mol_type = other DNA
gaacacaacccggttgtaatggttcatgcg

SEQ ID NO: 186 - DNA, 30 bp, synthetic construct
  source 1..30: mol_type = other DNA
gaacacaacccggttgtaatggttcatgat

SEQ ID NO: 187 - DNA, 30 bp, synthetic construct
  source 1..30: mol_type = other DNA
gaacacaacccggttgtaatggttcatgaa

SEQ ID NO: 188 - DNA, 30 bp, synthetic construct
  source 1..30: mol_type = other DNA
gaacacaacccggttgtaatggttcatttt

SEQ ID NO: 189 - DNA, 30 bp, synthetic construct
  source 1..30: mol_type = other DNA
gaacacaacccggttgtaatggttcattat

SEQ ID NO: 190 - DNA, 30 bp, synthetic construct
  source 1..30: mol_type = other DNA
gaacacaacccggttgtaatggttcattgc

SEQ ID NO: 191 - DNA, 30 bp, synthetic construct
  source 1..30: mol_type = other DNA
gaacacaacccggttgtaatggttcattgg

SEQ ID NO: 192 - DNA, 30 bp, Bacillus subtilis
  source 1..30: mol_type = genomic DNA
attggcggtgccagcttcaactttgcgggc

SEQ ID NO: 193 - DNA, 30 bp, synthetic construct
  source 1..30: mol_type = other DNA
atgggcggtgccagcttcaactttgcgggc

SEQ ID NO: 194 - DNA, 30 bp, synthetic construct
  source 1..30: mol_type = other DNA
accggcggtgccagcttcaactttgcgggc

SEQ ID NO: 195 - DNA, 30 bp, synthetic construct
  source 1..30: mol_type = other DNA
aacggcggtgccagcttcaactttgcgggc

SEQ ID NO: 196 - DNA, 30 bp, synthetic construct
  source 1..30: mol_type = other DNA
aaaggcggtgccagcttcaactttgcgggc

SEQ ID NO: 197 - DNA, 30 bp, synthetic construct
  source 1..30: mol_type = other DNA
agcggcggtgccagcttcaactttgcgggc

SEQ ID NO: 198 - DNA, 30 bp, synthetic construct
  source 1..30: mol_type = other DNA
cgtggcggtgccagcttcaactttgcgggc

SEQ ID NO: 199 - DNA, 30 bp, synthetic construct
  source 1..30: mol_type = other DNA
ctgggcggtgccagcttcaactttgcgggc

SEQ ID NO: 200 - DNA, 30 bp, synthetic construct
  source 1..30: mol_type = other DNA
ccgggcggtgccagcttcaactttgcgggc

SEQ ID NO: 201 - DNA, 30 bp, synthetic construct
  source 1..30: mol_type = other DNA
catggcggtgccagcttcaactttgcgggc

SEQ ID NO: 202 - DNA, 30 bp, synthetic construct
  source 1..30: mol_type = other DNA
cagggcggtgccagcttcaactttgcgggc

SEQ ID NO: 203 - DNA, 30 bp, synthetic construct
  source 1..30: mol_type = other DNA
gtgggcggtgccagcttcaactttgcgggc

SEQ ID NO: 204 - DNA, 30 bp, synthetic construct
  source 1..30: mol_type = other DNA
gcgggcggtgccagcttcaactttgcgggc

SEQ ID NO: 205 - DNA, 30 bp, synthetic construct
  source 1..30: mol_type = other DNA
gatggcggtgccagcttcaactttgcgggc

SEQ ID NO: 206 - DNA, 30 bp, synthetic construct
  source 1..30: mol_type = other DNA
gaaggcggtgccagcttcaactttgcgggc

SEQ ID NO: 207 - DNA, 30 bp, synthetic construct
  source 1..30: mol_type = other DNA
ggcggcggtgccagcttcaactttgcgggc

SEQ ID NO: 208 - DNA, 30 bp, synthetic construct
  source 1..30: mol_type = other DNA
tttggcggtgccagcttcaactttgcgggc

SEQ ID NO: 209 - DNA, 30 bp, synthetic construct
  source 1..30: mol_type = other DNA
tatggcggtgccagcttcaactttgcgggc

SEQ ID NO: 210 - DNA, 30 bp, synthetic construct
  source 1..30: mol_type = other DNA
tgcggcggtgccagcttcaactttgcgggc

SEQ ID NO: 211 - DNA, 30 bp, synthetic construct
  source 1..30: mol_type = other DNA
tggggcggtgccagcttcaactttgcgggc

SEQ ID NO: 212 - DNA, 30 bp, synthetic construct
  source 1..30: mol_type = other DNA
attattggtgccagcttcaactttgcgggc

SEQ ID NO: 213 - DNA, 30 bp, synthetic construct
  source 1..30: mol_type = other DNA
attatgggtgccagcttcaactttgcgggc

SEQ ID NO: 214 - DNA, 30 bp, synthetic construct
  source 1..30: mol_type = other DNA
attaccggtgccagcttcaactttgcgggc

SEQ ID NO: 215 - DNA, 30 bp, synthetic construct
  source 1..30: mol_type = other DNA
attaacggtgccagcttcaactttgcgggc

SEQ ID NO: 216 - DNA, 30 bp, synthetic construct
  source 1..30: mol_type = other DNA
attaaaggtgccagcttcaactttgcgggc

SEQ ID NO: 217 - DNA, 30 bp, synthetic construct
  source 1..30: mol_type = other DNA
attagcggtgccagcttcaactttgcgggc

SEQ ID NO: 218 - DNA, 30 bp, synthetic construct
  source 1..30: mol_type = other DNA
attcgtggtgccagcttcaactttgcgggc

SEQ ID NO: 219 - DNA, 30 bp, synthetic construct
  source 1..30: mol_type = other DNA
attctgggtgccagcttcaactttgcgggc

SEQ ID NO: 220 - DNA, 30 bp, synthetic construct
  source 1..30: mol_type = other DNA
attccgggtgccagcttcaactttgcgggc

SEQ ID NO: 221 - DNA, 30 bp, synthetic construct
  source 1..30: mol_type = other DNA
attcatggtgccagcttcaactttgcgggc

SEQ ID NO: 222 - DNA, 30 bp, synthetic construct
  source 1..30: mol_type = other DNA
attcagggtgccagcttcaactttgcgggc

SEQ ID NO: 223 - DNA, 30 bp, synthetic construct
  source 1..30: mol_type = other DNA
attgtgggtgccagcttcaactttgcgggc

SEQ ID NO: 224 - DNA, 30 bp, synthetic construct
  source 1..30: mol_type = other DNA
attgcgggtgccagcttcaactttgcgggc

SEQ ID NO: 225 - DNA, 30 bp, synthetic construct
  source 1..30: mol_type = other DNA
attgatggtgccagcttcaactttgcgggc

SEQ ID NO: 226 - DNA, 30 bp, synthetic construct
  source 1..30: mol_type = other DNA
attgaaggtgccagcttcaactttgcgggc

SEQ ID NO: 227 - DNA, 30 bp, synthetic construct
  source 1..30: mol_type = other DNA
atttttggtgccagcttcaactttgcgggc

SEQ ID NO: 228 - DNA, 30 bp, synthetic construct
  source 1..30: mol_type = other DNA
atttatggtgccagcttcaactttgcgggc

SEQ ID NO: 229 - DNA, 30 bp, synthetic construct
  source 1..30: mol_type = other DNA
atttgcggtgccagcttcaactttgcgggc

SEQ ID NO: 230 - DNA, 30 bp, synthetic construct
  source 1..30: mol_type = other DNA
atttggggtgccagcttcaactttgcgggc

SEQ ID NO: 231 - DNA, 30 bp, synthetic construct
  source 1..30: mol_type = other DNA
attggcattgccagcttcaactttgcgggc

SEQ ID NO: 232 - DNA, 30 bp, synthetic construct
  source 1..30: mol_type = other DNA
attggcatggccagcttcaactttgcgggc

SEQ ID NO: 233 - DNA, 30 bp, synthetic construct
  source 1..30: mol_type = other DNA
attggcaccgccagcttcaactttgcgggc

SEQ ID NO: 234 - DNA, 30 bp, synthetic construct
  source 1..30: mol_type = other DNA
attggcaacgccagcttcaactttgcgggc

SEQ ID NO: 235 - DNA, 30 bp, synthetic construct
  source 1..30: mol_type = other DNA
attggcaaagccagcttcaactttgcgggc

SEQ ID NO: 236 - DNA, 30 bp, synthetic construct
  source 1..30: mol_type = other DNA
attggcagcgccagcttcaactttgcgggc

SEQ ID NO: 237 - DNA, 30 bp, synthetic construct
  source 1..30: mol_type = other DNA
attggccgtgccagcttcaactttgcgggc

SEQ ID NO: 238 - DNA, 30 bp, synthetic construct
  source 1..30: mol_type = other DNA
attggcctggccagcttcaactttgcgggc

SEQ ID NO: 239 - DNA, 30 bp, synthetic construct
  source 1..30: mol_type = other DNA
attggcccggccagcttcaactttgcgggc

SEQ ID NO: 240 - DNA, 30 bp, synthetic construct
  source 1..30: mol_type = other DNA
attggccatgccagcttcaactttgcgggc

SEQ ID NO: 241 - DNA, 30 bp, synthetic construct
  source 1..30: mol_type = other DNA
attggccaggccagcttcaactttgcgggc

SEQ ID NO: 242 - DNA, 30 bp, synthetic construct
  source 1..30: mol_type = other DNA
attggcgtggccagcttcaactttgcgggc

SEQ ID NO: 243 - DNA, 30 bp, synthetic construct
  source 1..30: mol_type = other DNA
attggcgcggccagcttcaactttgcgggc

SEQ ID NO: 244 - DNA, 30 bp, synthetic construct
  source 1..30: mol_type = other DNA
attggcgatgccagcttcaactttgcgggc

SEQ ID NO: 245 - DNA, 30 bp, synthetic construct
  source 1..30: mol_type = other DNA
attggcgaagccagcttcaactttgcgggc

SEQ ID NO: 246 - DNA, 30 bp, synthetic construct
  source 1..30: mol_type = other DNA
attggctttgccagcttcaactttgcgggc

SEQ ID NO: 247 - DNA, 30 bp, synthetic construct
  source 1..30: mol_type = other DNA
attggctatgccagcttcaactttgcgggc

SEQ ID NO: 248 - DNA, 30 bp, synthetic construct
  source 1..30: mol_type = other DNA
attggctgcgccagcttcaactttgcgggc

SEQ ID NO: 249 - DNA, 30 bp, synthetic construct
  source 1..30: mol_type = other DNA
attggctgggccagcttcaactttgcgggc

SEQ ID NO: 250 - DNA, 30 bp, synthetic construct
  source 1..30: mol_type = other DNA
attggcggtattagcttcaactttgcgggc

SEQ ID NO: 251 - DNA, 30 bp, synthetic construct
  source 1..30: mol_type = other DNA
attggcggtatgagcttcaactttgcgggc

SEQ ID NO: 252 - DNA, 30 bp, synthetic construct
  source 1..30: mol_type = other DNA
attggcggtaccagcttcaactttgcgggc

SEQ ID NO: 253 - DNA, 30 bp, synthetic construct
  source 1..30: mol_type = other DNA
attggcggtaacagcttcaactttgcgggc

SEQ ID NO: 254 - DNA, 30 bp, synthetic construct
  source 1..30: mol_type = other DNA
attggcggtaaaagcttcaactttgcgggc

SEQ ID NO: 255 - DNA, 30 bp, synthetic construct
  source 1..30: mol_type = other DNA
attggcggtagcagcttcaactttgcgggc

SEQ ID NO: 256 - DNA, 30 bp, synthetic construct
  source 1..30: mol_type = other DNA
attggcggtcgtagcttcaactttgcgggc

SEQ ID NO: 257 - DNA, 30 bp, synthetic construct
  source 1..30: mol_type = other DNA
attggcggtctgagcttcaactttgcgggc

SEQ ID NO: 258 - DNA, 30 bp, synthetic construct
  source 1..30: mol_type = other DNA
attggcggtccgagcttcaactttgcgggc

SEQ ID NO: 259 - DNA, 30 bp, synthetic construct
  source 1..30: mol_type = other DNA
attggcggtcatagcttcaactttgcgggc

SEQ ID NO: 260 - DNA, 30 bp, synthetic construct
  source 1..30: mol_type = other DNA
attggcggtcagagcttcaactttgcgggc

SEQ ID NO: 261 - DNA, 30 bp, synthetic construct
  source 1..30: mol_type = other DNA
attggcggtgtgagcttcaactttgcgggc

SEQ ID NO: 262 - DNA, 30 bp, synthetic construct
  source 1..30: mol_type = other DNA
attggcggtgatagcttcaactttgcgggc

SEQ ID NO: 263 - DNA, 30 bp, synthetic construct
  source 1..30: mol_type = other DNA
attggcggtgaaagcttcaactttgcgggc

SEQ ID NO: 264 - DNA, 30 bp, synthetic construct
  source 1..30: mol_type = other DNA
attggcggtggcagcttcaactttgcgggc

SEQ ID NO: 265 - DNA, 30 bp, synthetic construct
  source 1..30: mol_type = other DNA
attggcggttttagcttcaactttgcgggc

SEQ ID NO: 266 - DNA, 30 bp, synthetic construct
  source 1..30: mol_type = other DNA
attggcggttatagcttcaactttgcgggc

SEQ ID NO: 267 - DNA, 30 bp, synthetic construct
  source 1..30: mol_type = other DNA
attggcggttgcagcttcaactttgcgggc

SEQ ID NO: 268 - DNA, 30 bp, synthetic construct
  source 1..30: mol_type = other DNA
attggcggttggagcttcaactttgcgggc

SEQ ID NO: 269 - DNA, 30 bp, synthetic construct
  source 1..30: mol_type = other DNA
attggcggtgccattttcaactttgcgggc

SEQ ID NO: 270 - DNA, 30 bp, synthetic construct
  source 1..30: mol_type = other DNA
attggcggtgccatgttcaactttgcgggc

SEQ ID NO: 271 - DNA, 30 bp, synthetic construct
  source 1..30: mol_type = other DNA
attggcggtgccaccttcaactttgcgggc

SEQ ID NO: 272 - DNA, 30 bp, synthetic construct
  source 1..30: mol_type = other DNA
attggcggtgccaacttcaactttgcgggc

SEQ ID NO: 273 - DNA, 30 bp, synthetic construct
  source 1..30: mol_type = other DNA
attggcggtgccaaattcaactttgcgggc

SEQ ID NO: 274 - DNA, 30 bp, synthetic construct
  source 1..30: mol_type = other DNA
attggcggtgcccgtttcaactttgcgggc

SEQ ID NO: 275 - DNA, 30 bp, synthetic construct
  source 1..30: mol_type = other DNA
attggcggtgccctgttcaactttgcgggc

SEQ ID NO: 276 - DNA, 30 bp, synthetic construct
  source 1..30: mol_type = other DNA
attggcggtgccccgttcaactttgcgggc

SEQ ID NO: 277 - DNA, 30 bp, synthetic construct
  source 1..30: mol_type = other DNA
attggcggtgcccatttcaactttgcgggc

SEQ ID NO: 278 - DNA, 30 bp, synthetic construct
  source 1..30: mol_type = other DNA
attggcggtgcccagttcaactttgcgggc

SEQ ID NO: 279 - DNA, 30 bp, synthetic construct
  source 1..30: mol_type = other DNA
attggcggtgccgtgttcaactttgcgggc

SEQ ID NO: 280 - DNA, 30 bp, synthetic construct
  source 1..30: mol_type = other DNA
attggcggtgccgcgttcaactttgcgggc

SEQ ID NO: 281 - DNA, 30 bp, synthetic construct
  source 1..30: mol_type = other DNA
attggcggtgccgatttcaactttgcgggc

SEQ ID NO: 282 - DNA, 30 bp, synthetic construct
  source 1..30: mol_type = other DNA
attggcggtgccgaattcaactttgcgggc

SEQ ID NO: 283 - DNA, 30 bp, synthetic construct
  source 1..30: mol_type = other DNA
attggcggtgccggcttcaactttgcgggc

SEQ ID NO: 284 - DNA, 30 bp, synthetic construct
  source 1..30: mol_type = other DNA
attggcggtgcctttttcaactttgcgggc

SEQ ID NO: 285 - DNA, 30 bp, synthetic construct
  source 1..30: mol_type = other DNA
attggcggtgcctatttcaactttgcgggc

SEQ ID NO: 286 - DNA, 30 bp, synthetic construct
  source 1..30: mol_type = other DNA
attggcggtgcctgcttcaactttgcgggc

SEQ ID NO: 287 - DNA, 30 bp, synthetic construct
  source 1..30: mol_type = other DNA
attggcggtgcctggttcaactttgcgggc

SEQ ID NO: 288 - DNA, 30 bp, synthetic construct
  source 1..30: mol_type = other DNA
attggcggtgccagcattaactttgcgggc

SEQ ID NO: 289 - DNA, 30 bp, synthetic construct
  source 1..30: mol_type = other DNA
attggcggtgccagcatgaactttgcgggc

SEQ ID NO: 290 - DNA, 30 bp, synthetic construct
  source 1..30: mol_type = other DNA
attggcggtgccagcaccaactttgcgggc

SEQ ID NO: 291 - DNA, 30 bp, synthetic construct
  source 1..30: mol_type = other DNA
attggcggtgccagcaacaactttgcgggc

SEQ ID NO: 292 - DNA, 30 bp, synthetic construct
  source 1..30: mol_type = other DNA
attggcggtgccagcaaaaactttgcgggc

SEQ ID NO: 293 - DNA, 30 bp, synthetic construct
  source 1..30: mol_type = other DNA
attggcggtgccagcagcaactttgcgggc

SEQ ID NO: 294 - DNA, 30 bp, synthetic construct
  source 1..30: mol_type = other DNA
attggcggtgccagccgtaactttgcgggc

SEQ ID NO: 295 - DNA, 30 bp, synthetic construct
  source 1..30: mol_type = other DNA
attggcggtgccagcctgaactttgcgggc

SEQ ID NO: 296 - DNA, 30 bp, synthetic construct
  source 1..30: mol_type = other DNA
attggcggtgccagcccgaactttgcgggc

SEQ ID NO: 297 - DNA, 30 bp, synthetic construct
  source 1..30: mol_type = other DNA
attggcggtgccagccataactttgcgggc

SEQ ID NO: 298 - DNA, 30 bp, synthetic construct
  source 1..30: mol_type = other DNA
attggcggtgccagccagaactttgcgggc

SEQ ID NO: 299 - DNA, 30 bp, synthetic construct
  source 1..30: mol_type = other DNA
attggcggtgccagcgtgaactttgcgggc

SEQ ID NO: 300 - DNA, 30 bp, synthetic construct
  source 1..30: mol_type = other DNA
attggcggtgccagcgcgaactttgcgggc

SEQ ID NO: 301 - DNA, 30 bp, synthetic construct
  source 1..30: mol_type = other DNA
attggcggtgccagcgataactttgcgggc

SEQ ID NO: 302 - DNA, 30 bp, synthetic construct
  source 1..30: mol_type = other DNA
attggcggtgccagcgaaaactttgcgggc

SEQ ID NO: 303 - DNA, 30 bp, synthetic construct
  source 1..30: mol_type = other DNA
attggcggtgccagcggcaactttgcgggc

SEQ ID NO: 304 - DNA, 30 bp, synthetic construct
  source 1..30: mol_type = other DNA
attggcggtgccagctataactttgcgggc

SEQ ID NO: 305 - DNA, 30 bp, synthetic construct
  source 1..30: mol_type = other DNA
attggcggtgccagctgcaactttgcgggc

SEQ ID NO: 306 - DNA, 30 bp, synthetic construct
  source 1..30: mol_type = other DNA
attggcggtgccagctggaactttgcgggc

SEQ ID NO: 307 - DNA, 30 bp, synthetic construct
  source 1..30: mol_type = other DNA
attggcggtgccagcttcatttttgcgggc

SEQ ID NO: 308 - DNA, 30 bp, synthetic construct
  source 1..30: mol_type = other DNA
attggcggtgccagcttcatgtttgcgggc

SEQ ID NO: 309 - DNA, 30 bp, synthetic construct
  source 1..30: mol_type = other DNA
attggcggtgccagcttcacctttgcgggc

SEQ ID NO: 310 - DNA, 30 bp, synthetic construct
  source 1..30: mol_type = other DNA
attggcggtgccagcttcaaatttgcgggc

SEQ ID NO: 311 - DNA, 30 bp, synthetic construct
  source 1..30: mol_type = other DNA
attggcggtgccagcttcagctttgcgggc

SEQ ID NO: 312 - DNA, 30 bp, synthetic construct
  source 1..30: mol_type = other DNA
attggcggtgccagcttccgttttgcgggc

SEQ ID NO: 313 - DNA, 30 bp, synthetic construct
  source 1..30: mol_type = other DNA
attggcggtgccagcttcctgtttgcgggc

SEQ ID NO: 314 - DNA, 30 bp, synthetic construct
  source 1..30: mol_type = other DNA
attggcggtgccagcttcccgtttgcgggc

SEQ ID NO: 315 - DNA, 30 bp, synthetic construct
  source 1..30: mol_type = other DNA
attggcggtgccagcttccattttgcgggc

SEQ ID NO: 316 - DNA, 30 bp, synthetic construct
  source 1..30: mol_type = other DNA
attggcggtgccagcttccagtttgcgggc

SEQ ID NO: 317 - DNA, 30 bp, synthetic construct
  source 1..30: mol_type = other DNA
attggcggtgccagcttcgtgtttgcgggc

SEQ ID NO: 318 - DNA, 30 bp, synthetic construct
  source 1..30: mol_type = other DNA
attggcggtgccagcttcgcgtttgcgggc

SEQ ID NO: 319 - DNA, 30 bp, synthetic construct
  source 1..30: mol_type = other DNA
attggcggtgccagcttcgattttgcgggc

SEQ ID NO: 320 - DNA, 30 bp, synthetic construct
  source 1..30: mol_type = other DNA
attggcggtgccagcttcgaatttgcgggc

SEQ ID NO: 321 - DNA, 30 bp, synthetic construct
  source 1..30: mol_type = other DNA
attggcggtgccagcttcggctttgcgggc

SEQ ID NO: 322 - DNA, 30 bp, synthetic construct
  source 1..30: mol_type = other DNA
attggcggtgccagcttcttttttgcgggc

SEQ ID NO: 323 - DNA, 30 bp, synthetic construct
  source 1..30: mol_type = other DNA
attggcggtgccagcttctattttgcgggc

SEQ ID NO: 324 - DNA, 30 bp, synthetic construct
  source 1..30: mol_type = other DNA
attggcggtgccagcttctgctttgcgggc

SEQ ID NO: 325 - DNA, 30 bp, synthetic construct
  source 1..30: mol_type = other DNA
attggcggtgccagcttctggtttgcgggc

SEQ ID NO: 326 - DNA, 30 bp, synthetic construct
  source 1..30: mol_type = other DNA
attggcggtgccagcttcaacattgcgggc

SEQ ID NO: 327 - DNA, 30 bp, synthetic construct
  source 1..30: mol_type = other DNA
attggcggtgccagcttcaacatggcgggc

SEQ ID NO: 328 - DNA, 30 bp, synthetic construct
  source 1..30: mol_type = other DNA
attggcggtgccagcttcaacaccgcgggc

SEQ ID NO: 329 - DNA, 30 bp, synthetic construct
  source 1..30: mol_type = other DNA
attggcggtgccagcttcaacaacgcgggc

SEQ ID NO: 330 - DNA, 30 bp, synthetic construct
  source 1..30: mol_type = other DNA
attggcggtgccagcttcaacaaagcgggc

SEQ ID NO: 331 - DNA, 30 bp, synthetic construct
  source 1..30: mol_type = other DNA
attggcggtgccagcttcaacagcgcgggc

SEQ ID NO: 332 - DNA, 30 bp, synthetic construct
  source 1..30: mol_type = other DNA
attggcggtgccagcttcaaccgtgcgggc

SEQ ID NO: 333 - DNA, 30 bp, synthetic construct
  source 1..30: mol_type = other DNA
attggcggtgccagcttcaacctggcgggc

SEQ ID NO: 334 - DNA, 30 bp, synthetic construct
  source 1..30: mol_type = other DNA
attggcggtgccagcttcaacccggcgggc

SEQ ID NO: 335 - DNA, 30 bp, synthetic construct
  source 1..30: mol_type = other DNA
attggcggtgccagcttcaaccatgcgggc

SEQ ID NO: 336 - DNA, 30 bp, synthetic construct
  source 1..30: mol_type = other DNA
attggcggtgccagcttcaaccaggcgggc

SEQ ID NO: 337 - DNA, 30 bp, synthetic construct
  source 1..30: mol_type = other DNA
attggcggtgccagcttcaacgtggcgggc

SEQ ID NO: 338 - DNA, 30 bp, synthetic construct
  source 1..30: mol_type = other DNA
attggcggtgccagcttcaacgcggcgggc

SEQ ID NO: 339 - DNA, 30 bp, synthetic construct
  source 1..30: mol_type = other DNA
attggcggtgccagcttcaacgatgcgggc

SEQ ID NO: 340 - DNA, 30 bp, synthetic construct
  source 1..30: mol_type = other DNA
attggcggtgccagcttcaacgaagcgggc

SEQ ID NO: 341 - DNA, 30 bp, synthetic construct
  source 1..30: mol_type = other DNA
attggcggtgccagcttcaacggcgcgggc

SEQ ID NO: 342 - DNA, 30 bp, synthetic construct
  source 1..30: mol_type = other DNA
attggcggtgccagcttcaactatgcgggc

SEQ ID NO: 343 - DNA, 30 bp, synthetic construct
  source 1..30: mol_type = other DNA
attggcggtgccagcttcaactgcgcgggc

SEQ ID NO: 344 - DNA, 30 bp, synthetic construct
  source 1..30: mol_type = other DNA
attggcggtgccagcttcaactgggcgggc

SEQ ID NO: 345 - DNA, 30 bp, synthetic construct
  source 1..30: mol_type = other DNA
attggcggtgccagcttcaactttattggc

SEQ ID NO: 346 - DNA, 30 bp, synthetic construct
  source 1..30: mol_type = other DNA
attggcggtgccagcttcaactttatgggc

SEQ ID NO: 347 - DNA, 30 bp, synthetic construct
  source 1..30: mol_type = other DNA
attggcggtgccagcttcaactttaccggc

SEQ ID NO: 348 - DNA, 30 bp, synthetic construct
  source 1..30: mol_type = other DNA
attggcggtgccagcttcaactttaacggc

SEQ ID NO: 349 - DNA, 30 bp, synthetic construct
  source 1..30: mol_type = other DNA
attggcggtgccagcttcaactttaaaggc

SEQ ID NO: 350 - DNA, 30 bp, synthetic construct
  source 1..30: mol_type = other DNA
attggcggtgccagcttcaactttagcggc

SEQ ID NO: 351 - DNA, 30 bp, synthetic construct
  source 1..30: mol_type = other DNA
attggcggtgccagcttcaactttcgtggc

SEQ ID NO: 352 - DNA, 30 bp, synthetic construct
  source 1..30: mol_type = other DNA
attggcggtgccagcttcaactttctgggc

SEQ ID NO: 353 - DNA, 30 bp, synthetic construct
  source 1..30: mol_type = other DNA
attggcggtgccagcttcaactttccgggc

SEQ ID NO: 354 - DNA, 30 bp, synthetic construct
  source 1..30: mol_type = other DNA
attggcggtgccagcttcaactttcatggc

SEQ ID NO: 355 - DNA, 30 bp, synthetic construct
  source 1..30: mol_type = other DNA
attggcggtgccagcttcaactttcagggc

SEQ ID NO: 356 - DNA, 30 bp, synthetic construct
  source 1..30: mol_type = other DNA
attggcggtgccagcttcaactttgtgggc

SEQ ID NO: 357 - DNA, 30 bp, synthetic construct
  source 1..30: mol_type = other DNA
attggcggtgccagcttcaactttgatggc

SEQ ID NO: 358 - DNA, 30 bp, synthetic construct
  source 1..30: mol_type = other DNA
attggcggtgccagcttcaactttgaaggc

SEQ ID NO: 359 - DNA, 30 bp, synthetic construct
  source 1..30: mol_type = other DNA
attggcggtgccagcttcaactttggcggc

SEQ ID NO: 360 - DNA, 30 bp, synthetic construct
  source 1..30: mol_type = other DNA
attggcggtgccagcttcaacttttttggc

SEQ ID NO: 361 - DNA, 30 bp, synthetic construct
  source 1..30: mol_type = other DNA
attggcggtgccagcttcaacttttatggc

SEQ ID NO: 362 - DNA, 30 bp, synthetic construct
  source 1..30: mol_type = other DNA
attggcggtgccagcttcaacttttgcggc

SEQ ID NO: 363 - DNA, 30 bp, synthetic construct
  source 1..30: mol_type = other DNA
attggcggtgccagcttcaacttttggggc

SEQ ID NO: 364 - DNA, 30 bp, synthetic construct
  source 1..30: mol_type = other DNA
attggcggtgccagcttcaactttgcgatt

SEQ ID NO: 365 - DNA, 30 bp, synthetic construct
  source 1..30: mol_type = other DNA
attggcggtgccagcttcaactttgcgatg

SEQ ID NO: 366 - DNA, 30 bp, synthetic construct
  source 1..30: mol_type = other DNA
attggcggtgccagcttcaactttgcgacc

SEQ ID NO: 367 - DNA, 30 bp, synthetic construct
  source 1..30: mol_type = other DNA
attggcggtgccagcttcaactttgcgaac

SEQ ID NO: 368 - DNA, 30 bp, synthetic construct
  source 1..30: mol_type = other DNA
attggcggtgccagcttcaactttgcgaaa

SEQ ID NO: 369 - DNA, 30 bp, synthetic construct
  source 1..30: mol_type = other DNA
attggcggtgccagcttcaactttgcgagc

SEQ ID NO: 370 - DNA, 30 bp, synthetic construct
  source 1..30: mol_type = other DNA
attggcggtgccagcttcaactttgcgcgt

SEQ ID NO: 371 - DNA, 30 bp, synthetic construct
  source 1..30: mol_type = other DNA
attggcggtgccagcttcaactttgcgctg

SEQ ID NO: 372 - DNA, 30 bp, synthetic construct
  source 1..30: mol_type = other DNA
attggcggtgccagcttcaactttgcgccg

SEQ ID NO: 373 - DNA, 30 bp, synthetic construct
  source 1..30: mol_type = other DNA
attggcggtgccagcttcaactttgcgcat

SEQ ID NO: 374 - DNA, 30 bp, synthetic construct
  source 1..30: mol_type = other DNA
attggcggtgccagcttcaactttgcgcag

SEQ ID NO: 375 - DNA, 30 bp, synthetic construct
  source 1..30: mol_type = other DNA
attggcggtgccagcttcaactttgcggtg

SEQ ID NO: 376 - DNA, 30 bp, synthetic construct
  source 1..30: mol_type = other DNA
attggcggtgccagcttcaactttgcggcg

SEQ ID NO: 377 - DNA, 30 bp, synthetic construct
  source 1..30: mol_type = other DNA
attggcggtgccagcttcaactttgcggat

SEQ ID NO: 378 - DNA, 30 bp, synthetic construct
  source 1..30: mol_type = other DNA
attggcggtgccagcttcaactttgcggaa

SEQ ID NO: 379 - DNA, 30 bp, synthetic construct
  source 1..30: mol_type = other DNA
attggcggtgccagcttcaactttgcgttt

SEQ ID NO: 380 - DNA, 30 bp, synthetic construct
  source 1..30: mol_type = other DNA
attggcggtgccagcttcaactttgcgtat

SEQ ID NO: 381 - DNA, 30 bp, synthetic construct
  source 1..30: mol_type = other DNA
attggcggtgccagcttcaactttgcgtgc

SEQ ID NO: 382 - DNA, 30 bp, synthetic construct
  source 1..30: mol_type = other DNA
attggcggtgccagcttcaactttgcgtgg

SEQ ID NO: 383 - DNA, 30 bp, Bacillus subtilis
  source 1..30: mol_type = genomic DNA
atcaaatcttatctggtatcccagggctgg

SEQ ID NO: 384 - DNA, 30 bp, synthetic construct
  source 1..30: mol_type = other DNA
atgaaatcttatctggtatcccagggctgg

SEQ ID NO: 385 - DNA, 30 bp, synthetic construct
  source 1..30: mol_type = other DNA
accaaatcttatctggtatcccagggctgg

SEQ ID NO: 386 - DNA, 30 bp, synthetic construct
  source 1..30: mol_type = other DNA
aacaaatcttatctggtatcccagggctgg

SEQ ID NO: 387 - DNA, 30 bp, synthetic construct
  source 1..30: mol_type = other DNA
aaaaaatcttatctggtatcccagggctgg

SEQ ID NO: 388 - DNA, 30 bp, synthetic construct
  source 1..30: mol_type = other DNA
agcaaatcttatctggtatcccagggctgg

SEQ ID NO: 389 - DNA, 30 bp, synthetic construct
  source 1..30: mol_type = other DNA
cgtaaatcttatctggtatcccagggctgg

SEQ ID NO: 390 - DNA, 30 bp, synthetic construct
  source 1..30: mol_type = other DNA
ctgaaatcttatctggtatcccagggctgg

SEQ ID NO: 391 - DNA, 30 bp, synthetic construct
  source 1..30: mol_type = other DNA
ccgaaatcttatctggtatcccagggctgg

SEQ ID NO: 392 - DNA, 30 bp, synthetic construct
  source 1..30: mol_type = other DNA
cataaatcttatctggtatcccagggctgg

SEQ ID NO: 393 - DNA, 30 bp, synthetic construct
  source 1..30: mol_type = other DNA
cagaaatcttatctggtatcccagggctgg

SEQ ID NO: 394 - DNA, 30 bp, synthetic construct
  source 1..30: mol_type = other DNA
gtgaaatcttatctggtatcccagggctgg

SEQ ID NO: 395 - DNA, 30 bp, synthetic construct
  source 1..30: mol_type = other DNA
gcgaaatcttatctggtatcccagggctgg

SEQ ID NO: 396 - DNA, 30 bp, synthetic construct
  source 1..30: mol_type = other DNA
gataaatcttatctggtatcccagggctgg

SEQ ID NO: 397 - DNA, 30 bp, synthetic construct
  source 1..30: mol_type = other DNA
gaaaaatcttatctggtatcccagggctgg

SEQ ID NO: 398 - DNA, 30 bp, synthetic construct
  source 1..30: mol_type = other DNA
ggcaaatcttatctggtatcccagggctgg

SEQ ID NO: 399 - DNA, 30 bp, synthetic construct
  source 1..30: mol_type = other DNA
tttaaatcttatctggtatcccagggctgg

SEQ ID NO: 400 - DNA, 30 bp, synthetic construct
  source 1..30: mol_type = other DNA
tataaatcttatctggtatcccagggctgg

SEQ ID NO: 401 - DNA, 30 bp, synthetic construct
  source 1..30: mol_type = other DNA
tgcaaatcttatctggtatcccagggctgg

SEQ ID NO: 402 - DNA, 30 bp, synthetic construct
  source 1..30: mol_type = other DNA
tggaaatcttatctggtatcccagggctgg

SEQ ID NO: 403 - DNA, 30 bp, synthetic construct
  source 1..30: mol_type = other DNA
atcatttcttatctggtatcccagggctgg

SEQ ID NO: 404 - DNA, 30 bp, synthetic construct
  source 1..30: mol_type = other DNA
atcatgtcttatctggtatcccagggctgg

SEQ ID NO: 405 - DNA, 30 bp, synthetic construct
  source 1..30: mol_type = other DNA
atcacctcttatctggtatcccagggctgg

SEQ ID NO: 406 - DNA, 30 bp, synthetic construct
  source 1..30: mol_type = other DNA
atcaactcttatctggtatcccagggctgg

SEQ ID NO: 407 - DNA, 30 bp, synthetic construct
  source 1..30: mol_type = other DNA
atcagctcttatctggtatcccagggctgg

SEQ ID NO: 408 - DNA, 30 bp, synthetic construct
  source 1..30: mol_type = other DNA
atccgttcttatctggtatcccagggctgg

SEQ ID NO: 409 - DNA, 30 bp, synthetic construct
  source 1..30: mol_type = other DNA
atcctgtcttatctggtatcccagggctgg

SEQ ID NO: 410 - DNA, 30 bp, synthetic construct
  source 1..30: mol_type = other DNA
atcccgtcttatctggtatcccagggctgg

SEQ ID NO: 411 - DNA, 30 bp, synthetic construct
  source 1..30: mol_type = other DNA
atccattcttatctggtatcccagggctgg

SEQ ID NO: 412 - DNA, 30 bp, synthetic construct
  source 1..30: mol_type = other DNA
atccagtcttatctggtatcccagggctgg

SEQ ID NO: 413 - DNA, 30 bp, synthetic construct
  source 1..30: mol_type = other DNA
atcgtgtcttatctggtatcccagggctgg

SEQ ID NO: 414 - DNA, 30 bp, synthetic construct
  source 1..30: mol_type = other DNA
atcgcgtcttatctggtatcccagggctgg

SEQ ID NO: 415 - DNA, 30 bp, synthetic construct
  source 1..30: mol_type = other DNA
atcgattcttatctggtatcccagggctgg

SEQ ID NO: 416 - DNA, 30 bp, synthetic construct
  source 1..30: mol_type = other DNA
atcgaatcttatctggtatcccagggctgg

SEQ ID NO: 417 - DNA, 30 bp, synthetic construct
  source 1..30: mol_type = other DNA
atcggctcttatctggtatcccagggctgg

SEQ ID NO: 418 - DNA, 30 bp, synthetic construct
  source 1..30: mol_type = other DNA
atcttttcttatctggtatcccagggctgg

SEQ ID NO: 419 - DNA, 30 bp, synthetic construct
  source 1..30: mol_type = other DNA
atctattcttatctggtatcccagggctgg

SEQ ID NO: 420 - DNA, 30 bp, synthetic construct
  source 1..30: mol_type = other DNA
atctgctcttatctggtatcccagggctgg

SEQ ID NO: 421 - DNA, 30 bp, synthetic construct
  source 1..30: mol_type = other DNA
atctggtcttatctggtatcccagggctgg

SEQ ID NO: 422 - DNA, 30 bp, synthetic construct
  source 1..30: mol_type = other DNA
atcaaaatttatctggtatcccagggctgg

SEQ ID NO: 423 - DNA, 30 bp, synthetic construct
  source 1..30: mol_type = other DNA
atcaaaatgtatctggtatcccagggctgg

SEQ ID NO: 424 - DNA, 30 bp, synthetic construct
  source 1..30: mol_type = other DNA
atcaaaacctatctggtatcccagggctgg

SEQ ID NO: 425 - DNA, 30 bp, synthetic construct
  source 1..30: mol_type = other DNA
atcaaaaactatctggtatcccagggctgg

SEQ ID NO: 426 - DNA, 30 bp, synthetic construct
  source 1..30: mol_type = other DNA
atcaaaaaatatctggtatcccagggctgg

SEQ ID NO: 427 - DNA, 30 bp, synthetic construct
  source 1..30: mol_type = other DNA
atcaaacgttatctggtatcccagggctgg

SEQ ID NO: 428 - DNA, 30 bp, synthetic construct
  source 1..30: mol_type = other DNA
atcaaactgtatctggtatcccagggctgg

SEQ ID NO: 429 - DNA, 30 bp, synthetic construct
  source 1..30: mol_type = other DNA
atcaaaccgtatctggtatcccagggctgg

SEQ ID NO: 430 - DNA, 30 bp, synthetic construct
  source 1..30: mol_type = other DNA
atcaaacattatctggtatcccagggctgg

SEQ ID NO: 431 - DNA, 30 bp, synthetic construct
  source 1..30: mol_type = other DNA
atcaaacagtatctggtatcccagggctgg

SEQ ID NO: 432 - DNA, 30 bp, synthetic construct
  source 1..30: mol_type = other DNA
atcaaagtgtatctggtatcccagggctgg

SEQ ID NO: 433 - DNA, 30 bp, synthetic construct
  source 1..30: mol_type = other DNA
atcaaagcgtatctggtatcccagggctgg

SEQ ID NO: 434 - DNA, 30 bp, synthetic construct
  source 1..30: mol_type = other DNA
atcaaagattatctggtatcccagggctgg

SEQ ID NO: 435 - DNA, 30 bp, synthetic construct
  source 1..30: mol_type = other DNA
atcaaagaatatctggtatcccagggctgg

SEQ ID NO: 436 - DNA, 30 bp, synthetic construct
  source 1..30: mol_type = other DNA
atcaaaggctatctggtatcccagggctgg

SEQ ID NO: 437 - DNA, 30 bp, synthetic construct
  source 1..30: mol_type = other DNA
atcaaattttatctggtatcccagggctgg

SEQ ID NO: 438 - DNA, 30 bp, synthetic construct
  source 1..30: mol_type = other DNA
atcaaatattatctggtatcccagggctgg

SEQ ID NO: 439 - DNA, 30 bp, synthetic construct
  source 1..30: mol_type = other DNA
atcaaatgctatctggtatcccagggctgg

SEQ ID NO: 440 - DNA, 30 bp, synthetic construct
  source 1..30: mol_type = other DNA
atcaaatggtatctggtatcccagggctgg

SEQ ID NO: 441 - DNA, 30 bp, synthetic construct
  source 1..30: mol_type = other DNA
atcaaatctattctggtatcccagggctgg

SEQ ID NO: 442 - DNA, 30 bp, synthetic construct
  source 1..30: mol_type = other DNA
atcaaatctatgctggtatcccagggctgg

SEQ ID NO: 443 - DNA, 30 bp, synthetic construct
  source 1..30: mol_type = other DNA
atcaaatctaccctggtatcccagggctgg

SEQ ID NO: 444 - DNA, 30 bp, synthetic construct
  source 1..30: mol_type = other DNA
atcaaatctaacctggtatcccagggctgg

SEQ ID NO: 445 - DNA, 30 bp, synthetic construct
  source 1..30: mol_type = other DNA
atcaaatctaaactggtatcccagggctgg

SEQ ID NO: 446 - DNA, 30 bp, synthetic construct
  source 1..30: mol_type = other DNA
atcaaatctagcctggtatcccagggctgg

SEQ ID NO: 447 - DNA, 30 bp, synthetic construct
  source 1..30: mol_type = other DNA
atcaaatctcgtctggtatcccagggctgg

SEQ ID NO: 448 - DNA, 30 bp, synthetic construct
  source 1..30: mol_type = other DNA
atcaaatctctgctggtatcccagggctgg

SEQ ID NO: 449 - DNA, 30 bp, synthetic construct
  source 1..30: mol_type = other DNA
atcaaatctccgctggtatcccagggctgg

SEQ ID NO: 450 - DNA, 30 bp, synthetic construct
  source 1..30: mol_type = other DNA
atcaaatctcatctggtatcccagggctgg

SEQ ID NO: 451 - DNA, 30 bp, synthetic construct
  source 1..30: mol_type = other DNA
atcaaatctcagctggtatcccagggctgg

SEQ ID NO: 452 - DNA, 30 bp, synthetic construct
  source 1..30: mol_type = other DNA
atcaaatctgtgctggtatcccagggctgg

SEQ ID NO: 453 - DNA, 30 bp, synthetic construct
  source 1..30: mol_type = other DNA
atcaaatctgcgctggtatcccagggctgg

SEQ ID NO: 454 - DNA, 30 bp, synthetic construct
  source 1..30: mol_type = other DNA
atcaaatctgatctggtatcccagggctgg

SEQ ID NO: 455 - DNA, 30 bp, synthetic construct
  source 1..30: mol_type = other DNA
atcaaatctgaactggtatcccagggctgg

SEQ ID NO: 456 - DNA, 30 bp, synthetic construct
  source 1..30: mol_type = other DNA
atcaaatctggcctggtatcccagggctgg

SEQ ID NO: 457 - DNA, 30 bp, synthetic construct
  source 1..30: mol_type = other DNA
atcaaatcttttctggtatcccagggctgg

SEQ ID NO: 458 - DNA, 30 bp, synthetic construct
  source 1..30: mol_type = other DNA
atcaaatcttgcctggtatcccagggctgg

SEQ ID NO: 459 - DNA, 30 bp, synthetic construct
  source 1..30: mol_type = other DNA
atcaaatcttggctggtatcccagggctgg

SEQ ID NO: 460 - DNA, 30 bp, synthetic construct
  source 1..30: mol_type = other DNA
atcaaatcttatattgtatcccagggctgg

SEQ ID NO: 461 - DNA, 30 bp, synthetic construct
  source 1..30: mol_type = other DNA
atcaaatcttatatggtatcccagggctgg

SEQ ID NO: 462 - DNA, 30 bp, synthetic construct
  source 1..30: mol_type = other DNA
atcaaatcttataccgtatcccagggctgg

SEQ ID NO: 463 - DNA, 30 bp, synthetic construct
  source 1..30: mol_type = other DNA
atcaaatcttataacgtatcccagggctgg

SEQ ID NO: 464 - DNA, 30 bp, synthetic construct
  source 1..30: mol_type = other DNA
atcaaatcttataaagtatcccagggctgg

SEQ ID NO: 465 - DNA, 30 bp, synthetic construct
  source 1..30: mol_type = other DNA
atcaaatcttatagcgtatcccagggctgg

SEQ ID NO: 466 - DNA, 30 bp, synthetic construct
  source 1..30: mol_type = other DNA
atcaaatcttatcgtgtatcccagggctgg

SEQ ID NO: 467 - DNA, 30 bp, synthetic construct
  source 1..30: mol_type = other DNA
atcaaatcttatccggtatcccagggctgg

SEQ ID NO: 468 - DNA, 30 bp, synthetic construct
  source 1..30: mol_type = other DNA
atcaaatcttatcatgtatcccagggctgg

SEQ ID NO: 469 - DNA, 30 bp, synthetic construct
  source 1..30: mol_type = other DNA
atcaaatcttatcaggtatcccagggctgg

SEQ ID NO: 470 - DNA, 30 bp, synthetic construct
  source 1..30: mol_type = other DNA
atcaaatcttatgtggtatcccagggctgg

SEQ ID NO: 471 - DNA, 30 bp, synthetic construct
  source 1..30: mol_type = other DNA
atcaaatcttatgcggtatcccagggctgg

SEQ ID NO: 472 - DNA, 30 bp, synthetic construct
  source 1..30: mol_type = other DNA
atcaaatcttatgatgtatcccagggctgg

SEQ ID NO: 473 - DNA, 30 bp, synthetic construct
  source 1..30: mol_type = other DNA
atcaaatcttatgaagtatcccagggctgg

SEQ ID NO: 474 - DNA, 30 bp, synthetic construct
  source 1..30: mol_type = other DNA
atcaaatcttatggcgtatcccagggctgg

SEQ ID NO: 475 - DNA, 30 bp, synthetic construct
  source 1..30: mol_type = other DNA
atcaaatcttattttgtatcccagggctgg

SEQ ID NO: 476 - DNA, 30 bp, synthetic construct
  source 1..30: mol_type = other DNA
atcaaatcttattatgtatcccagggctgg

SEQ ID NO: 477 - DNA, 30 bp, synthetic construct
  source 1..30: mol_type = other DNA
atcaaatcttattgcgtatcccagggctgg

SEQ ID NO: 478 - DNA, 30 bp, synthetic construct
  source 1..30: mol_type = other DNA
atcaaatcttattgggtatcccagggctgg

SEQ ID NO: 479 - DNA, 30 bp, synthetic construct
  source 1..30: mol_type = other DNA
atcaaatcttatctgatttcccagggctgg

SEQ ID NO: 480 - DNA, 30 bp, synthetic construct
  source 1..30: mol_type = other DNA
atcaaatcttatctgatgtcccagggctgg

SEQ ID NO: 481 - DNA, 30 bp, synthetic construct
  source 1..30: mol_type = other DNA
atcaaatcttatctgacctcccagggctgg

SEQ ID NO: 482 - DNA, 30 bp, synthetic construct
  source 1..30: mol_type = other DNA
atcaaatcttatctgaactcccagggctgg

SEQ ID NO: 483 - DNA, 30 bp, synthetic construct
  source 1..30: mol_type = other DNA
atcaaatcttatctgaaatcccagggctgg

SEQ ID NO: 484 - DNA, 30 bp, synthetic construct
  source 1..30: mol_type = other DNA
atcaaatcttatctgagctcccagggctgg

SEQ ID NO: 485 - DNA, 30 bp, synthetic construct
  source 1..30: mol_type = other DNA
atcaaatcttatctgcgttcccagggctgg

SEQ ID NO: 486 - DNA, 30 bp, synthetic construct
  source 1..30: mol_type = other DNA
atcaaatcttatctgctgtcccagggctgg

SEQ ID NO: 487 - DNA, 30 bp, synthetic construct
  source 1..30: mol_type = other DNA
atcaaatcttatctgccgtcccagggctgg

SEQ ID NO: 488 - DNA, 30 bp, synthetic construct
  source 1..30: mol_type = other DNA
atcaaatcttatctgcattcccagggctgg

SEQ ID NO: 489 - DNA, 30 bp, synthetic construct
  source 1..30: mol_type = other DNA
atcaaatcttatctgcagtcccagggctgg

SEQ ID NO: 490 - DNA, 30 bp, synthetic construct
  source 1..30: mol_type = other DNA
atcaaatcttatctggcgtcccagggctgg

SEQ ID NO: 491 - DNA, 30 bp, synthetic construct
  source 1..30: mol_type = other DNA
atcaaatcttatctggattcccagggctgg

SEQ ID NO: 492 - DNA, 30 bp, synthetic construct
  source 1..30: mol_type = other DNA
atcaaatcttatctggaatcccagggctgg

SEQ ID NO: 493 - DNA, 30 bp, synthetic construct
  source 1..30: mol_type = other DNA
atcaaatcttatctgggctcccagggctgg

SEQ ID NO: 494 - DNA, 30 bp, synthetic construct
  source 1..30: mol_type = other DNA
atcaaatcttatctgttttcccagggctgg

SEQ ID NO: 495 - DNA, 30 bp, synthetic construct
  source 1..30: mol_type = other DNA
atcaaatcttatctgtattcccagggctgg

SEQ ID NO: 496 - DNA, 30 bp, synthetic construct
  source 1..30: mol_type = other DNA
atcaaatcttatctgtgctcccagggctgg

SEQ ID NO: 497 - DNA, 30 bp, synthetic construct
  source 1..30: mol_type = other DNA
atcaaatcttatctgtggtcccagggctgg

SEQ ID NO: 498 - DNA, 30 bp, synthetic construct
  source 1..30: mol_type = other DNA
atcaaatcttatctggtaattcagggctgg

SEQ ID NO: 499 - DNA, 30 bp, synthetic construct
  source 1..30: mol_type = other DNA
atcaaatcttatctggtaatgcagggctgg

SEQ ID NO: 500 - DNA, 30 bp, synthetic construct
  source 1..30: mol_type = other DNA
atcaaatcttatctggtaacccagggctgg

SEQ ID NO: 501 - DNA, 30 bp, synthetic construct
  source 1..30: mol_type = other DNA
atcaaatcttatctggtaaaccagggctgg

SEQ ID NO: 502 - DNA, 30 bp, synthetic construct
  source 1..30: mol_type = other DNA
atcaaatcttatctggtaaaacagggctgg

SEQ ID NO: 503 - DNA, 30 bp, synthetic construct
  source 1..30: mol_type = other DNA
atcaaatcttatctggtacgtcagggctgg

SEQ ID NO: 504 - DNA, 30 bp, synthetic construct
  source 1..30: mol_type = other DNA
atcaaatcttatctggtactgcagggctgg

SEQ ID NO: 505 - DNA, 30 bp, synthetic construct
  source 1..30: mol_type = other DNA
atcaaatcttatctggtaccgcagggctgg

SEQ ID NO: 506 - DNA, 30 bp, synthetic construct
  source 1..30: mol_type = other DNA
atcaaatcttatctggtacatcagggctgg

SEQ ID NO: 507 - DNA, 30 bp, synthetic construct
  source 1..30: mol_type = other DNA
atcaaatcttatctggtacagcagggctgg

SEQ ID NO: 508 - DNA, 30 bp, synthetic construct
  source 1..30: mol_type = other DNA
atcaaatcttatctggtagtgcagggctgg

SEQ ID NO: 509 - DNA, 30 bp, synthetic construct
  source 1..30: mol_type = other DNA
atcaaatcttatctggtagcgcagggctgg

SEQ ID NO: 510 - DNA, 30 bp, synthetic construct
  source 1..30: mol_type = other DNA
atcaaatcttatctggtagatcagggctgg

SEQ ID NO: 511 - DNA, 30 bp, synthetic construct
  source 1..30: mol_type = other DNA
atcaaatcttatctggtagaacagggctgg

SEQ ID NO: 512 - DNA, 30 bp, synthetic construct
  source 1..30: mol_type = other DNA
atcaaatcttatctggtaggccagggctgg

SEQ ID NO: 513 - DNA, 30 bp, synthetic construct
  source 1..30: mol_type = other DNA
atcaaatcttatctggtatttcagggctgg

SEQ ID NO: 514 - DNA, 30 bp, synthetic construct
  source 1..30: mol_type = other DNA
atcaaatcttatctggtatatcagggctgg

SEQ ID NO: 515 - DNA, 30 bp, synthetic construct
  source 1..30: mol_type = other DNA
atcaaatcttatctggtatgccagggctgg

SEQ ID NO: 516 - DNA, 30 bp, synthetic construct
  source 1..30: mol_type = other DNA
atcaaatcttatctggtatggcagggctgg

SEQ ID NO: 517 - DNA, 30 bp, synthetic construct
  source 1..30: mol_type = other DNA
atcaaatcttatctggtatccattggctgg

SEQ ID NO: 518 - DNA, 30 bp, synthetic construct
  source 1..30: mol_type = other DNA
atcaaatcttatctggtatccatgggctgg

SEQ ID NO: 519 - DNA, 30 bp, synthetic construct
  source 1..30: mol_type = other DNA
atcaaatcttatctggtatccaccggctgg

SEQ ID NO: 520 - DNA, 30 bp, synthetic construct
  source 1..30: mol_type = other DNA
atcaaatcttatctggtatccaacggctgg

SEQ ID NO: 521 - DNA, 30 bp, synthetic construct
  source 1..30: mol_type = other DNA
atcaaatcttatctggtatccaaaggctgg

SEQ ID NO: 522 - DNA, 30 bp, synthetic construct
  source 1..30: mol_type = other DNA
atcaaatcttatctggtatccagcggctgg

SEQ ID NO: 523 - DNA, 30 bp, synthetic construct
  source 1..30: mol_type = other DNA
atcaaatcttatctggtatcccgtggctgg

SEQ ID NO: 524 - DNA, 30 bp, synthetic construct
  source 1..30: mol_type = other DNA
atcaaatcttatctggtatccctgggctgg

SEQ ID NO: 525 - DNA, 30 bp, synthetic construct
  source 1..30: mol_type = other DNA
atcaaatcttatctggtatccccgggctgg

SEQ ID NO: 526 - DNA, 30 bp, synthetic construct
  source 1..30: mol_type = other DNA
atcaaatcttatctggtatcccatggctgg

SEQ ID NO: 527 - DNA, 30 bp, synthetic construct
  source 1..30: mol_type = other DNA
atcaaatcttatctggtatccgtgggctgg

SEQ ID NO: 528 - DNA, 30 bp, synthetic construct
  source 1..30: mol_type = other DNA
atcaaatcttatctggtatccgcgggctgg

SEQ ID NO: 529 - DNA, 30 bp, synthetic construct
  source 1..30: mol_type = other DNA
atcaaatcttatctggtatccgatggctgg

SEQ ID NO: 530 - DNA, 30 bp, synthetic construct
  source 1..30: mol_type = other DNA
atcaaatcttatctggtatccgaaggctgg

SEQ ID NO: 531 - DNA, 30 bp, synthetic construct
  source 1..30: mol_type = other DNA
atcaaatcttatctggtatccggcggctgg

SEQ ID NO: 532 - DNA, 30 bp, synthetic construct
  source 1..30: mol_type = other DNA
atcaaatcttatctggtatcctttggctgg

SEQ ID NO: 533 - DNA, 30 bp, synthetic construct
  source 1..30: mol_type = other DNA
atcaaatcttatctggtatcctatggctgg

SEQ ID NO: 534 - DNA, 30 bp, synthetic construct
  source 1..30: mol_type = other DNA
atcaaatcttatctggtatcctgcggctgg

SEQ ID NO: 535 - DNA, 30 bp, synthetic construct
  source 1..30: mol_type = other DNA
atcaaatcttatctggtatcctggggctgg

SEQ ID NO: 536 - DNA, 30 bp, synthetic construct
  source 1..30: mol_type = other DNA
atcaaatcttatctggtatcccagatttgg

SEQ ID NO: 537 - DNA, 30 bp, synthetic construct
  source 1..30: mol_type = other DNA
atcaaatcttatctggtatcccagatgtgg

SEQ ID NO: 538 - DNA, 30 bp, synthetic construct
  source 1..30: mol_type = other DNA
atcaaatcttatctggtatcccagacctgg

SEQ ID NO: 539 - DNA, 30 bp, synthetic construct
  source 1..30: mol_type = other DNA
atcaaatcttatctggtatcccagaactgg

SEQ ID NO: 540 - DNA, 30 bp, synthetic construct
  source 1..30: mol_type = other DNA
atcaaatcttatctggtatcccagaaatgg

SEQ ID NO: 541 - DNA, 30 bp, synthetic construct
  source 1..30: mol_type = other DNA
atcaaatcttatctggtatcccagagctgg

SEQ ID NO: 542 - DNA, 30 bp, synthetic construct
  source 1..30: mol_type = other DNA
atcaaatcttatctggtatcccagcgttgg

SEQ ID NO: 543 - DNA, 30 bp, synthetic construct
  source 1..30: mol_type = other DNA
atcaaatcttatctggtatcccagctgtgg

SEQ ID NO: 544 - DNA, 30 bp, synthetic construct
  source 1..30: mol_type = other DNA
atcaaatcttatctggtatcccagccgtgg

SEQ ID NO: 545 - DNA, 30 bp, synthetic construct
  source 1..30: mol_type = other DNA
atcaaatcttatctggtatcccagcattgg

SEQ ID NO: 546 - DNA, 30 bp, synthetic construct
  source 1..30: mol_type = other DNA
atcaaatcttatctggtatcccagcagtgg

SEQ ID NO: 547 - DNA, 30 bp, synthetic construct
  source 1..30: mol_type = other DNA
atcaaatcttatctggtatcccaggtgtgg

SEQ ID NO: 548 - DNA, 30 bp, synthetic construct
  source 1..30: mol_type = other DNA
atcaaatcttatctggtatcccaggcgtgg

SEQ ID NO: 549 - DNA, 30 bp, synthetic construct
  source 1..30: mol_type = other DNA
atcaaatcttatctggtatcccaggattgg

SEQ ID NO: 550 - DNA, 30 bp, synthetic construct
  source 1..30: mol_type = other DNA
atcaaatcttatctggtatcccaggaatgg

SEQ ID NO: 551 - DNA, 30 bp, synthetic construct
  source 1..30: mol_type = other DNA
atcaaatcttatctggtatcccagttttgg

SEQ ID NO: 552 - DNA, 30 bp, synthetic construct
  source 1..30: mol_type = other DNA
atcaaatcttatctggtatcccagtattgg

SEQ ID NO: 553 - DNA, 30 bp, synthetic construct
  source 1..30: mol_type = other DNA
atcaaatcttatctggtatcccagtgctgg

SEQ ID NO: 554 - DNA, 30 bp, synthetic construct
  source 1..30: mol_type = other DNA
atcaaatcttatctggtatcccagtggtgg

SEQ ID NO: 555 - DNA, 30 bp, synthetic construct
  source 1..30: mol_type = other DNA
atcaaatcttatctggtatcccagggcatt

SEQ ID NO: 556 - DNA, 30 bp, synthetic construct
  source 1..30: mol_type = other DNA
atcaaatcttatctggtatcccagggcatg

SEQ ID NO: 557 - DNA, 30 bp, synthetic construct
  source 1..30: mol_type = other DNA
atcaaatcttatctggtatcccagggcacc

SEQ ID NO: 558 - DNA, 30 bp, synthetic construct
  source 1..30: mol_type = other DNA
atcaaatcttatctggtatcccagggcaac

SEQ ID NO: 559 - DNA, 30 bp, synthetic construct
  source 1..30: mol_type = other DNA
atcaaatcttatctggtatcccagggcaaa

SEQ ID NO: 560 - DNA, 30 bp, synthetic construct
  source 1..30: mol_type = other DNA
atcaaatcttatctggtatcccagggcagc

SEQ ID NO: 561 - DNA, 30 bp, synthetic construct
  source 1..30: mol_type = other DNA
atcaaatcttatctggtatcccagggccgt

SEQ ID NO: 562 - DNA, 30 bp, synthetic construct
  source 1..30: mol_type = other DNA
atcaaatcttatctggtatcccagggcctg

SEQ ID NO: 563 - DNA, 30 bp, synthetic construct
  source 1..30: mol_type = other DNA
atcaaatcttatctggtatcccagggcccg

SEQ ID NO: 564 - DNA, 30 bp, synthetic construct
  source 1..30: mol_type = other DNA
atcaaatcttatctggtatcccagggccat

SEQ ID NO: 565 - DNA, 30 bp, synthetic construct
  source 1..30: mol_type = other DNA
atcaaatcttatctggtatcccagggccag

SEQ ID NO: 566 - DNA, 30 bp, synthetic construct
  source 1..30: mol_type = other DNA
atcaaatcttatctggtatcccagggcgtg

SEQ ID NO: 567 - DNA, 30 bp, synthetic construct
  source 1..30: mol_type = other DNA
atcaaatcttatctggtatcccagggcgcg

SEQ ID NO: 568 - DNA, 30 bp, synthetic construct
  source 1..30: mol_type = other DNA
atcaaatcttatctggtatcccagggcgat

SEQ ID NO: 569 - DNA, 30 bp, synthetic construct
  source 1..30: mol_type = other DNA
atcaaatcttatctggtatcccagggcgaa

SEQ ID NO: 570 - DNA, 30 bp, synthetic construct
  source 1..30: mol_type = other DNA
atcaaatcttatctggtatcccagggcggc

SEQ ID NO: 571 - DNA, 30 bp, synthetic construct
  source 1..30: mol_type = other DNA
atcaaatcttatctggtatcccagggcttt

SEQ ID NO: 572 - DNA, 30 bp, synthetic construct
  source 1..30: mol_type = other DNA
atcaaatcttatctggtatcccagggctat

SEQ ID NO: 573 - DNA, 30 bp, synthetic construct
  source 1..30: mol_type = other DNA
atcaaatcttatctggtatcccagggctgc

SEQ ID NO: 574 - DNA, 30 bp, Bacillus subtilis
  source 1..30: mol_type = genomic DNA
tcccgtgataaactgtacgcagtagacttc

SEQ ID NO: 575 - DNA, 30 bp, synthetic construct
  source 1..30: mol_type = other DNA
attcgtgataaactgtacgcagtagacttc

SEQ ID NO: 576 - DNA, 30 bp, synthetic construct
  source 1..30: mol_type = other DNA
atgcgtgataaactgtacgcagtagacttc

SEQ ID NO: 577 - DNA, 30 bp, synthetic construct
  source 1..30: mol_type = other DNA
acccgtgataaactgtacgcagtagacttc

SEQ ID NO: 578 - DNA, 30 bp, synthetic construct
  source 1..30: mol_type = other DNA
aaccgtgataaactgtacgcagtagacttc

SEQ ID NO: 579 - DNA, 30 bp, synthetic construct
  source 1..30: mol_type = other DNA
aaacgtgataaactgtacgcagtagacttc

SEQ ID NO: 580 - DNA, 30 bp, synthetic construct
  source 1..30: mol_type = other DNA
cgtcgtgataaactgtacgcagtagacttc

SEQ ID NO: 581 - DNA, 30 bp, synthetic construct
  source 1..30: mol_type = other DNA
ctgcgtgataaactgtacgcagtagacttc

SEQ ID NO: 582 - DNA, 30 bp, synthetic construct
  source 1..30: mol_type = other DNA
ccgcgtgataaactgtacgcagtagacttc

SEQ ID NO: 583 - DNA, 30 bp, synthetic construct
  source 1..30: mol_type = other DNA
catcgtgataaactgtacgcagtagacttc

SEQ ID NO: 584 - DNA, 30 bp, synthetic construct
  source 1..30: mol_type = other DNA
cagcgtgataaactgtacgcagtagacttc

SEQ ID NO: 585 - DNA, 30 bp, synthetic construct
  source 1..30: mol_type = other DNA
gtgcgtgataaactgtacgcagtagacttc

SEQ ID NO: 586 - DNA, 30 bp, synthetic construct
  source 1..30: mol_type = other DNA
gcgcgtgataaactgtacgcagtagacttc

SEQ ID NO: 587 - DNA, 30 bp, synthetic construct
  source 1..30: mol_type = other DNA
gatcgtgataaactgtacgcagtagacttc

SEQ ID NO: 588 - DNA, 30 bp, synthetic construct
  source 1..30: mol_type = other DNA
gaacgtgataaactgtacgcagtagacttc

SEQ ID NO: 589 - DNA, 30 bp, synthetic construct
  source 1..30: mol_type = other DNA
ggccgtgataaactgtacgcagtagacttc

SEQ ID NO: 590 - DNA, 30 bp, synthetic construct
  source 1..30: mol_type = other DNA
tttcgtgataaactgtacgcagtagacttc

SEQ ID NO: 591 - DNA, 30 bp, synthetic construct
  source 1..30: mol_type = other DNA
tatcgtgataaactgtacgcagtagacttc

SEQ ID NO: 592 - DNA, 30 bp, synthetic construct
  source 1..30: mol_type = other DNA
tgccgtgataaactgtacgcagtagacttc

SEQ ID NO: 593 - DNA, 30 bp, synthetic construct
  source 1..30: mol_type = other DNA
tggcgtgataaactgtacgcagtagacttc

SEQ ID NO: 594 - DNA, 30 bp, synthetic construct
  source 1..30: mol_type = other DNA
tccattgataaactgtacgcagtagacttc

SEQ ID NO: 595 - DNA, 30 bp, synthetic construct
  source 1..30: mol_type = other DNA
tccatggataaactgtacgcagtagacttc

SEQ ID NO: 596 - DNA, 30 bp, synthetic construct
  source 1..30: mol_type = other DNA
tccaccgataaactgtacgcagtagacttc

SEQ ID NO: 597 - DNA, 30 bp, synthetic construct
  source 1..30: mol_type = other DNA
tccaacgataaactgtacgcagtagacttc

SEQ ID NO: 598 - DNA, 30 bp, synthetic construct
  source 1..30: mol_type = other DNA
tccaaagataaactgtacgcagtagacttc

SEQ ID NO: 599 - DNA, 30 bp, synthetic construct
  source 1..30: mol_type = other DNA
tccagcgataaactgtacgcagtagacttc

SEQ ID NO: 600 - DNA, 30 bp, synthetic construct
  source 1..30: mol_type = other DNA
tccctggataaactgtacgcagtagacttc

SEQ ID NO: 601 - DNA, 30 bp, synthetic construct
  source 1..30: mol_type = other DNA
tccccggataaactgtacgcagtagacttc

SEQ ID NO: 602 - DNA, 30 bp, synthetic construct
  source 1..30: mol_type = other DNA
tcccatgataaactgtacgcagtagacttc

SEQ ID NO: 603 - DNA, 30 bp, synthetic construct
  source 1..30: mol_type = other DNA
tcccaggataaactgtacgcagtagacttc

SEQ ID NO: 604 - DNA, 30 bp, synthetic construct
  source 1..30: mol_type = other DNA
tccgtggataaactgtacgcagtagacttc

SEQ ID NO: 605 - DNA, 30 bp, synthetic construct
  source 1..30: mol_type = other DNA
tccgcggataaactgtacgcagtagacttc

SEQ ID NO: 606 - DNA, 30 bp, synthetic construct
  source 1..30: mol_type = other DNA
tccgatgataaactgtacgcagtagacttc

SEQ ID NO: 607 - DNA, 30 bp, synthetic construct
  source 1..30: mol_type = other DNA
tccgaagataaactgtacgcagtagacttc

SEQ ID NO: 608 - DNA, 30 bp, synthetic construct
  source 1..30: mol_type = other DNA
tccggcgataaactgtacgcagtagacttc

SEQ ID NO: 609 - DNA, 30 bp, synthetic construct
  source 1..30: mol_type = other DNA
tcctttgataaactgtacgcagtagacttc

SEQ ID NO: 610 - DNA, 30 bp, synthetic construct
  source 1..30: mol_type = other DNA
tcctatgataaactgtacgcagtagacttc

SEQ ID NO: 611 - DNA, 30 bp, synthetic construct
  source 1..30: mol_type = other DNA
tcctgcgataaactgtacgcagtagacttc

SEQ ID NO: 612 - DNA, 30 bp, synthetic construct
  source 1..30: mol_type = other DNA
tcctgggataaactgtacgcagtagacttc

SEQ ID NO: 613 - DNA, 30 bp, synthetic construct
  source 1..30: mol_type = other DNA
tcccgtattaaactgtacgcagtagacttc

SEQ ID NO: 614 - DNA, 30 bp, synthetic construct
  source 1..30: mol_type = other DNA
tcccgtatgaaactgtacgcagtagacttc

SEQ ID NO: 615 - DNA, 30 bp, synthetic construct
  source 1..30: mol_type = other DNA
tcccgtaccaaactgtacgcagtagacttc

SEQ ID NO: 616 - DNA, 30 bp, synthetic construct
  source 1..30: mol_type = other DNA
tcccgtaacaaactgtacgcagtagacttc

SEQ ID NO: 617 - DNA, 30 bp, synthetic construct
  source 1..30: mol_type = other DNA
tcccgtaaaaaactgtacgcagtagacttc

SEQ ID NO: 618 - DNA, 30 bp, synthetic construct
  source 1..30: mol_type = other DNA
tcccgtagcaaactgtacgcagtagacttc

SEQ ID NO: 619 - DNA, 30 bp, synthetic construct
  source 1..30: mol_type = other DNA
tcccgtcgtaaactgtacgcagtagacttc

SEQ ID NO: 620 - DNA, 30 bp, synthetic construct
  source 1..30: mol_type = other DNA
tcccgtctgaaactgtacgcagtagacttc

SEQ ID NO: 621 - DNA, 30 bp, synthetic construct
  source 1..30: mol_type = other DNA
tcccgtccgaaactgtacgcagtagacttc

SEQ ID NO: 622 - DNA, 30 bp, synthetic construct
  source 1..30: mol_type = other DNA
tcccgtcataaactgtacgcagtagacttc

SEQ ID NO: 623 - DNA, 30 bp, synthetic construct
  source 1..30: mol_type = other DNA
tcccgtcagaaactgtacgcagtagacttc

SEQ ID NO: 624 - DNA, 30 bp, synthetic construct
  source 1..30: mol_type = other DNA
tcccgtgtgaaactgtacgcagtagacttc

SEQ ID NO: 625 - DNA, 30 bp, synthetic construct
  source 1..30: mol_type = other DNA
tcccgtgcgaaactgtacgcagtagacttc

SEQ ID NO: 626 - DNA, 30 bp, synthetic construct
  source 1..30: mol_type = other DNA
tcccgtgaaaaactgtacgcagtagacttc

SEQ ID NO: 627 - DNA, 30 bp, synthetic construct
  source 1..30: mol_type = other DNA
tcccgtggcaaactgtacgcagtagacttc

SEQ ID NO: 628 - DNA, 30 bp, synthetic construct
  source 1..30: mol_type = other DNA
tcccgttttaaactgtacgcagtagacttc

SEQ ID NO: 629 - DNA, 30 bp, synthetic construct
  source 1..30: mol_type = other DNA
tcccgttataaactgtacgcagtagacttc

SEQ ID NO: 630 - DNA, 30 bp, synthetic construct
  source 1..30: mol_type = other DNA
tcccgttgcaaactgtacgcagtagacttc

SEQ ID NO: 631 - DNA, 30 bp, synthetic construct
  source 1..30: mol_type = other DNA
tcccgttggaaactgtacgcagtagacttc

SEQ ID NO: 632 - DNA, 30 bp, synthetic construct
  source 1..30: mol_type = other DNA
tcccgtgatattctgtacgcagtagacttc

SEQ ID NO: 633 - DNA, 30 bp, synthetic construct
  source 1..30: mol_type = other DNA
tcccgtgatatgctgtacgcagtagacttc

SEQ ID NO: 634 - DNA, 30 bp, synthetic construct
  source 1..30: mol_type = other DNA
tcccgtgataccctgtacgcagtagacttc

SEQ ID NO: 635 - DNA, 30 bp, synthetic construct
  source 1..30: mol_type = other DNA
tcccgtgataacctgtacgcagtagacttc

SEQ ID NO: 636 - DNA, 30 bp, synthetic construct
  source 1..30: mol_type = other DNA
tcccgtgatagcctgtacgcagtagacttc

SEQ ID NO: 637 - DNA, 30 bp, synthetic construct
  source 1..30: mol_type = other DNA
tcccgtgatcgtctgtacgcagtagacttc

SEQ ID NO: 638 - DNA, 30 bp, synthetic construct
  source 1..30: mol_type = other DNA
tcccgtgatctgctgtacgcagtagacttc

SEQ ID NO: 639 - DNA, 30 bp, synthetic construct
  source 1..30: mol_type = other DNA
tcccgtgatccgctgtacgcagtagacttc

SEQ ID NO: 640 - DNA, 30 bp, synthetic construct
  source 1..30: mol_type = other DNA
tcccgtgatcatctgtacgcagtagacttc

SEQ ID NO: 641 - DNA, 30 bp, synthetic construct
  source 1..30: mol_type = other DNA
tcccgtgatcagctgtacgcagtagacttc

SEQ ID NO: 642 - DNA, 30 bp, synthetic construct
  source 1..30: mol_type = other DNA
tcccgtgatgtgctgtacgcagtagacttc

SEQ ID NO: 643 - DNA, 30 bp, synthetic construct
  source 1..30: mol_type = other DNA
tcccgtgatgcgctgtacgcagtagacttc

SEQ ID NO: 644 - DNA, 30 bp, synthetic construct
  source 1..30: mol_type = other DNA
tcccgtgatgatctgtacgcagtagacttc

SEQ ID NO: 645 - DNA, 30 bp, synthetic construct
  source 1..30: mol_type = other DNA
tcccgtgatgaactgtacgcagtagacttc

SEQ ID NO: 646 - DNA, 30 bp, synthetic construct
  source 1..30: mol_type = other DNA
tcccgtgatggcctgtacgcagtagacttc

SEQ ID NO: 647 - DNA, 30 bp, synthetic construct
  source 1..30: mol_type = other DNA
tcccgtgattttctgtacgcagtagacttc

SEQ ID NO: 648 - DNA, 30 bp, synthetic construct
  source 1..30: mol_type = other DNA
tcccgtgattatctgtacgcagtagacttc

SEQ ID NO: 649 - DNA, 30 bp, synthetic construct
  source 1..30: mol_type = other DNA
tcccgtgattgcctgtacgcagtagacttc

SEQ ID NO: 650 - DNA, 30 bp, synthetic construct
  source 1..30: mol_type = other DNA
tcccgtgattggctgtacgcagtagacttc

SEQ ID NO: 651 - DNA, 30 bp, synthetic construct
  source 1..30: mol_type = other DNA
tcccgtgataaaatttacgcagtagacttc

SEQ ID NO: 652 - DNA, 30 bp, synthetic construct
  source 1..30: mol_type = other DNA
tcccgtgataaaatgtacgcagtagacttc

SEQ ID NO: 653 - DNA, 30 bp, synthetic construct
  source 1..30: mol_type = other DNA
tcccgtgataaaacctacgcagtagacttc

SEQ ID NO: 654 - DNA, 30 bp, synthetic construct
  source 1..30: mol_type = other DNA
tcccgtgataaaaactacgcagtagacttc

SEQ ID NO: 655 - DNA, 30 bp, synthetic construct
  source 1..30: mol_type = other DNA
tcccgtgataaaaaatacgcagtagacttc

SEQ ID NO: 656 - DNA, 30 bp, synthetic construct
  source 1..30: mol_type = other DNA
tcccgtgataaaagctacgcagtagacttc

SEQ ID NO: 657 - DNA, 30 bp, synthetic construct
  source 1..30: mol_type = other DNA
tcccgtgataaacgttacgcagtagacttc

SEQ ID NO: 658 - DNA, 30 bp, synthetic construct
  source 1..30: mol_type = other DNA
tcccgtgataaaccgtacgcagtagacttc

SEQ ID NO: 659 - DNA, 30 bp, synthetic construct
  source 1..30: mol_type = other DNA
tcccgtgataaacattacgcagtagacttc

SEQ ID NO: 660 - DNA, 30 bp, synthetic construct
  source 1..30: mol_type = other DNA
tcccgtgataaacagtacgcagtagacttc

SEQ ID NO: 661 - DNA, 30 bp, synthetic construct
  source 1..30: mol_type = other DNA
tcccgtgataaagtgtacgcagtagacttc

SEQ ID NO: 662 - DNA, 30 bp, synthetic construct
  source 1..30: mol_type = other DNA
tcccgtgataaagcgtacgcagtagacttc

SEQ ID NO: 663 - DNA, 30 bp, synthetic construct
  source 1..30: mol_type = other DNA
tcccgtgataaagattacgcagtagacttc

SEQ ID NO: 664 - DNA, 30 bp, synthetic construct
  source 1..30: mol_type = other DNA
tcccgtgataaagaatacgcagtagacttc

SEQ ID NO: 665 - DNA, 30 bp, synthetic construct
  source 1..30: mol_type = other DNA
tcccgtgataaaggctacgcagtagacttc

SEQ ID NO: 666 - DNA, 30 bp, synthetic construct
  source 1..30: mol_type = other DNA
tcccgtgataaattttacgcagtagacttc

SEQ ID NO: 667 - DNA, 30 bp, synthetic construct
  source 1..30: mol_type = other DNA
tcccgtgataaatattacgcagtagacttc

SEQ ID NO: 668 - DNA, 30 bp, synthetic construct
  source 1..30: mol_type = other DNA
tcccgtgataaatgctacgcagtagacttc

SEQ ID NO: 669 - DNA, 30 bp, synthetic construct
  source 1..30: mol_type = other DNA
tcccgtgataaatggtacgcagtagacttc

SEQ ID NO: 670 - DNA, 30 bp, synthetic construct
  source 1..30: mol_type = other DNA
tcccgtgataaactgattgcagtagacttc

SEQ ID NO: 671 - DNA, 30 bp, synthetic construct
  source 1..30: mol_type = other DNA
tcccgtgataaactgatggcagtagacttc

SEQ ID NO: 672 - DNA, 30 bp, synthetic construct
  source 1..30: mol_type = other DNA
tcccgtgataaactgaccgcagtagacttc

SEQ ID NO: 673 - DNA, 30 bp, synthetic construct
  source 1..30: mol_type = other DNA
tcccgtgataaactgaacgcagtagacttc

SEQ ID NO: 674 - DNA, 30 bp, synthetic construct
  source 1..30: mol_type = other DNA
tcccgtgataaactgaaagcagtagacttc

SEQ ID NO: 675 - DNA, 30 bp, synthetic construct
  source 1..30: mol_type = other DNA
tcccgtgataaactgagcgcagtagacttc

SEQ ID NO: 676 - DNA, 30 bp, synthetic construct
  source 1..30: mol_type = other DNA
tcccgtgataaactgcgtgcagtagacttc

SEQ ID NO: 677 - DNA, 30 bp, synthetic construct
  source 1..30: mol_type = other DNA
tcccgtgataaactgctggcagtagacttc

SEQ ID NO: 678 - DNA, 30 bp, synthetic construct
  source 1..30: mol_type = other DNA
tcccgtgataaactgccggcagtagacttc

SEQ ID NO: 679 - DNA, 30 bp, synthetic construct
  source 1..30: mol_type = other DNA
tcccgtgataaactgcatgcagtagacttc

SEQ ID NO: 680 - DNA, 30 bp, synthetic construct
  source 1..30: mol_type = other DNA
tcccgtgataaactgcaggcagtagacttc

SEQ ID NO: 681 - DNA, 30 bp, synthetic construct
  source 1..30: mol_type = other DNA
tcccgtgataaactggtggcagtagacttc

SEQ ID NO: 682 - DNA, 30 bp, synthetic construct
  source 1..30: mol_type = other DNA
tcccgtgataaactggcggcagtagacttc

SEQ ID NO: 683 - DNA, 30 bp, synthetic construct
  source 1..30: mol_type = other DNA
tcccgtgataaactggatgcagtagacttc

SEQ ID NO: 684 - DNA, 30 bp, synthetic construct
  source 1..30: mol_type = other DNA
tcccgtgataaactggaagcagtagacttc

SEQ ID NO: 685 - DNA, 30 bp, synthetic construct
  source 1..30: mol_type = other DNA
tcccgtgataaactgggcgcagtagacttc

SEQ ID NO: 686 - DNA, 30 bp, synthetic construct
  source 1..30: mol_type = other DNA
tcccgtgataaactgtttgcagtagacttc

SEQ ID NO: 687 - DNA, 30 bp, synthetic construct
  source 1..30: mol_type = other DNA
tcccgtgataaactgtgcgcagtagacttc

SEQ ID NO: 688 - DNA, 30 bp, synthetic construct
  source 1..30: mol_type = other DNA
tcccgtgataaactgtgggcagtagacttc

SEQ ID NO: 689 - DNA, 30 bp, synthetic construct
  source 1..30: mol_type = other DNA
tcccgtgataaactgtacattgtagacttc

SEQ ID NO: 690 - DNA, 30 bp, synthetic construct
  source 1..30: mol_type = other DNA
tcccgtgataaactgtacatggtagacttc

SEQ ID NO: 691 - DNA, 30 bp, synthetic construct
  source 1..30: mol_type = other DNA
tcccgtgataaactgtacaccgtagacttc

SEQ ID NO: 692 - DNA, 30 bp, synthetic construct
  source 1..30: mol_type = other DNA
tcccgtgataaactgtacaacgtagacttc

SEQ ID NO: 693 - DNA, 30 bp, synthetic construct
  source 1..30: mol_type = other DNA
tcccgtgataaactgtacaaagtagacttc

SEQ ID NO: 694 - DNA, 30 bp, synthetic construct
  source 1..30: mol_type = other DNA
tcccgtgataaactgtacagcgtagacttc

SEQ ID NO: 695 - DNA, 30 bp, synthetic construct
  source 1..30: mol_type = other DNA
tcccgtgataaactgtaccgtgtagacttc

SEQ ID NO: 696 - DNA, 30 bp, synthetic construct
  source 1..30: mol_type = other DNA
tcccgtgataaactgtacctggtagacttc

SEQ ID NO: 697 - DNA, 30 bp, synthetic construct
  source 1..30: mol_type = other DNA
tcccgtgataaactgtacccggtagacttc

SEQ ID NO: 698 - DNA, 30 bp, synthetic construct
  source 1..30: mol_type = other DNA
tcccgtgataaactgtaccatgtagacttc

SEQ ID NO: 699 - DNA, 30 bp, synthetic construct
  source 1..30: mol_type = other DNA
tcccgtgataaactgtaccaggtagacttc

SEQ ID NO: 700 - DNA, 30 bp, synthetic construct
  source 1..30: mol_type = other DNA
tcccgtgataaactgtacgtggtagacttc

SEQ ID NO: 701 - DNA, 30 bp, synthetic construct
  source 1..30: mol_type = other DNA
tcccgtgataaactgtacgatgtagacttc

SEQ ID NO: 702 - DNA, 30 bp, synthetic construct
  source 1..30: mol_type = other DNA
tcccgtgataaactgtacgaagtagacttc

SEQ ID NO: 703 - DNA, 30 bp, synthetic construct
  source 1..30: mol_type = other DNA
tcccgtgataaactgtacggcgtagacttc

SEQ ID NO: 704 - DNA, 30 bp, synthetic construct
  source 1..30: mol_type = other DNA
tcccgtgataaactgtactttgtagacttc

SEQ ID NO: 705 - DNA, 30 bp, synthetic construct
  source 1..30: mol_type = other DNA
tcccgtgataaactgtactatgtagacttc

SEQ ID NO: 706 - DNA, 30 bp, synthetic construct
  source 1..30: mol_type = other DNA
tcccgtgataaactgtactgcgtagacttc

SEQ ID NO: 707 - DNA, 30 bp, synthetic construct
  source 1..30: mol_type = other DNA
tcccgtgataaactgtactgggtagacttc

SEQ ID NO: 708 - DNA, 30 bp, synthetic construct
  source 1..30: mol_type = other DNA
tcccgtgataaactgtacgcaattgacttc

SEQ ID NO: 709 - DNA, 30 bp, synthetic construct
  source 1..30: mol_type = other DNA
tcccgtgataaactgtacgcaatggacttc

SEQ ID NO: 710 - DNA, 30 bp, synthetic construct
  source 1..30: mol_type = other DNA
tcccgtgataaactgtacgcaaccgacttc

SEQ ID NO: 711 - DNA, 30 bp, synthetic construct
  source 1..30: mol_type = other DNA
tcccgtgataaactgtacgcaaacgacttc

SEQ ID NO: 712 - DNA, 30 bp, synthetic construct
  source 1..30: mol_type = other DNA
tcccgtgataaactgtacgcaaaagacttc

SEQ ID NO: 713 - DNA, 30 bp, synthetic construct
  source 1..30: mol_type = other DNA
tcccgtgataaactgtacgcaagcgacttc

SEQ ID NO: 714 - DNA, 30 bp, synthetic construct
  source 1..30: mol_type = other DNA
tcccgtgataaactgtacgcacgtgacttc

SEQ ID NO: 715 - DNA, 30 bp, synthetic construct
  source 1..30: mol_type = other DNA
tcccgtgataaactgtacgcactggacttc

SEQ ID NO: 716 - DNA, 30 bp, synthetic construct
  source 1..30: mol_type = other DNA
tcccgtgataaactgtacgcaccggacttc

SEQ ID NO: 717 - DNA, 30 bp, synthetic construct
  source 1..30: mol_type = other DNA
tcccgtgataaactgtacgcacatgacttc

SEQ ID NO: 718 - DNA, 30 bp, synthetic construct
  source 1..30: mol_type = other DNA
tcccgtgataaactgtacgcacaggacttc

SEQ ID NO: 719 - DNA, 30 bp, synthetic construct
  source 1..30: mol_type = other DNA
tcccgtgataaactgtacgcagcggacttc

SEQ ID NO: 720 - DNA, 30 bp, synthetic construct
  source 1..30: mol_type = other DNA
tcccgtgataaactgtacgcagatgacttc

SEQ ID NO: 721 - DNA, 30 bp, synthetic construct
  source 1..30: mol_type = other DNA
tcccgtgataaactgtacgcagaagacttc

SEQ ID NO: 722 - DNA, 30 bp, synthetic construct
  source 1..30: mol_type = other DNA
tcccgtgataaactgtacgcaggcgacttc

SEQ ID NO: 723 - DNA, 30 bp, synthetic construct
  source 1..30: mol_type = other DNA
tcccgtgataaactgtacgcatttgacttc

SEQ ID NO: 724 - DNA, 30 bp, synthetic construct
  source 1..30: mol_type = other DNA
tcccgtgataaactgtacgcatatgacttc

SEQ ID NO: 725 - DNA, 30 bp, synthetic construct
  source 1..30: mol_type = other DNA
tcccgtgataaactgtacgcatgcgacttc

SEQ ID NO: 726 - DNA, 30 bp, synthetic construct
  source 1..30: mol_type = other DNA
tcccgtgataaactgtacgcatgggacttc

SEQ ID NO: 727 - DNA, 30 bp, synthetic construct
  source 1..30: mol_type = other DNA
tcccgtgataaactgtacgcagtaattttc

SEQ ID NO: 728 - DNA, 30 bp, synthetic construct
  source 1..30: mol_type = other DNA
tcccgtgataaactgtacgcagtaatgttc

SEQ ID NO: 729 - DNA, 30 bp, synthetic construct
  source 1..30: mol_type = other DNA
tcccgtgataaactgtacgcagtaaccttc

SEQ ID NO: 730 - DNA, 30 bp, synthetic construct
  source 1..30: mol_type = other DNA
tcccgtgataaactgtacgcagtaaacttc

SEQ ID NO: 731 - DNA, 30 bp, synthetic construct
  source 1..30: mol_type = other DNA
tcccgtgataaactgtacgcagtaaaattc

SEQ ID NO: 732 - DNA, 30 bp, synthetic construct
  source 1..30: mol_type = other DNA
tcccgtgataaactgtacgcagtaagcttc

SEQ ID NO: 733 - DNA, 30 bp, synthetic construct
  source 1..30: mol_type = other DNA
tcccgtgataaactgtacgcagtacgtttc

SEQ ID NO: 734 - DNA, 30 bp, synthetic construct
  source 1..30: mol_type = other DNA
tcccgtgataaactgtacgcagtactgttc

SEQ ID NO: 735 - DNA, 30 bp, synthetic construct
  source 1..30: mol_type = other DNA
tcccgtgataaactgtacgcagtaccgttc

SEQ ID NO: 736 - DNA, 30 bp, synthetic construct
  source 1..30: mol_type = other DNA
tcccgtgataaactgtacgcagtacatttc

SEQ ID NO: 737 - DNA, 30 bp, synthetic construct
  source 1..30: mol_type = other DNA
tcccgtgataaactgtacgcagtacagttc

SEQ ID NO: 738 - DNA, 30 bp, synthetic construct
  source 1..30: mol_type = other DNA
tcccgtgataaactgtacgcagtagtgttc

SEQ ID NO: 739 - DNA, 30 bp, synthetic construct
  source 1..30: mol_type = other DNA
tcccgtgataaactgtacgcagtagcgttc

SEQ ID NO: 740 - DNA, 30 bp, synthetic construct
  source 1..30: mol_type = other DNA
tcccgtgataaactgtacgcagtagaattc

SEQ ID NO: 741 - DNA, 30 bp, synthetic construct
  source 1..30: mol_type = other DNA
tcccgtgataaactgtacgcagtaggcttc

SEQ ID NO: 742 - DNA, 30 bp, synthetic construct
  source 1..30: mol_type = other DNA
tcccgtgataaactgtacgcagtatttttc

SEQ ID NO: 743 - DNA, 30 bp, synthetic construct
  source 1..30: mol_type = other DNA
tcccgtgataaactgtacgcagtatatttc

SEQ ID NO: 744 - DNA, 30 bp, synthetic construct
  source 1..30: mol_type = other DNA
tcccgtgataaactgtacgcagtatgcttc

SEQ ID NO: 745 - DNA, 30 bp, synthetic construct
  source 1..30: mol_type = other DNA
tcccgtgataaactgtacgcagtatggttc

SEQ ID NO: 746 - DNA, 30 bp, synthetic construct
  source 1..30: mol_type = other DNA
tcccgtgataaactgtacgcagtagacatt

SEQ ID NO: 747 - DNA, 30 bp, synthetic construct
  source 1..30: mol_type = other DNA
tcccgtgataaactgtacgcagtagacatg

SEQ ID NO: 748 - DNA, 30 bp, synthetic construct
  source 1..30: mol_type = other DNA
tcccgtgataaactgtacgcagtagacacc

SEQ ID NO: 749 - DNA, 30 bp, synthetic construct
  source 1..30: mol_type = other DNA
tcccgtgataaactgtacgcagtagacaac

SEQ ID NO: 750 - DNA, 30 bp, synthetic construct
  source 1..30: mol_type = other DNA
tcccgtgataaactgtacgcagtagacaaa

SEQ ID NO: 751 - DNA, 30 bp, synthetic construct
  source 1..30: mol_type = other DNA
tcccgtgataaactgtacgcagtagacagc

SEQ ID NO: 752 - DNA, 30 bp, synthetic construct
  source 1..30: mol_type = other DNA
tcccgtgataaactgtacgcagtagaccgt

SEQ ID NO: 753 - DNA, 30 bp, synthetic construct
  source 1..30: mol_type = other DNA
tcccgtgataaactgtacgcagtagacctg

SEQ ID NO: 754 - DNA, 30 bp, synthetic construct
  source 1..30: mol_type = other DNA
tcccgtgataaactgtacgcagtagacccg

SEQ ID NO: 755 - DNA, 30 bp, synthetic construct
  source 1..30: mol_type = other DNA
tcccgtgataaactgtacgcagtagaccat

SEQ ID NO: 756 - DNA, 30 bp, synthetic construct
  source 1..30: mol_type = other DNA
tcccgtgataaactgtacgcagtagaccag

SEQ ID NO: 757 - DNA, 30 bp, synthetic construct
  source 1..30: mol_type = other DNA
tcccgtgataaactgtacgcagtagacgtg

SEQ ID NO: 758 - DNA, 30 bp, synthetic construct
  source 1..30: mol_type = other DNA
tcccgtgataaactgtacgcagtagacgcg

SEQ ID NO: 759 - DNA, 30 bp, synthetic construct
  source 1..30: mol_type = other DNA
tcccgtgataaactgtacgcagtagacgat

SEQ ID NO: 760 - DNA, 30 bp, synthetic construct
  source 1..30: mol_type = other DNA
tcccgtgataaactgtacgcagtagacgaa

SEQ ID NO: 761 - DNA, 30 bp, synthetic construct
  source 1..30: mol_type = other DNA
tcccgtgataaactgtacgcagtagacggc

SEQ ID NO: 762 - DNA, 30 bp, synthetic construct
  source 1..30: mol_type = other DNA
tcccgtgataaactgtacgcagtagactat

SEQ ID NO: 763 - DNA, 30 bp, synthetic construct
  source 1..30: mol_type = other DNA
tcccgtgataaactgtacgcagtagactgc

SEQ ID NO: 764 - DNA, 30 bp, synthetic construct
  source 1..30: mol_type = other DNA
tcccgtgataaactgtacgcagtagactgg

SEQ ID NO: 765 - DNA, 30 bp, Bacillus subtilis
  source 1..30: mol_type = genomic DNA
tgggacaagaccggcaccaactacaataac

SEQ ID NO: 766 - DNA, 30 bp, synthetic construct
  source 1..30: mol_type = other DNA
attgacaagaccggcaccaactacaataac

SEQ ID NO: 767 - DNA, 30 bp, synthetic construct
  source 1..30: mol_type = other DNA
atggacaagaccggcaccaactacaataac

SEQ ID NO: 768 - DNA, 30 bp, synthetic construct
  source 1..30: mol_type = other DNA
accgacaagaccggcaccaactacaataac

SEQ ID NO: 769 - DNA, 30 bp, synthetic construct
  source 1..30: mol_type = other DNA
aacgacaagaccggcaccaactacaataac

SEQ ID NO: 770 - DNA, 30 bp, synthetic construct
  source 1..30: mol_type = other DNA
aaagacaagaccggcaccaactacaataac

SEQ ID NO: 771 - DNA, 30 bp, synthetic construct
  source 1..30: mol_type = other DNA
agcgacaagaccggcaccaactacaataac

SEQ ID NO: 772 - DNA, 30 bp, synthetic construct
  source 1..30: mol_type = other DNA
cgtgacaagaccggcaccaactacaataac

SEQ ID NO: 773 - DNA, 30 bp, synthetic construct
  source 1..30: mol_type = other DNA
ctggacaagaccggcaccaactacaataac

SEQ ID NO: 774 - DNA, 30 bp, synthetic construct
  source 1..30: mol_type = other DNA
ccggacaagaccggcaccaactacaataac

SEQ ID NO: 775 - DNA, 30 bp, synthetic construct
  source 1..30: mol_type = other DNA
catgacaagaccggcaccaactacaataac

SEQ ID NO: 776 - DNA, 30 bp, synthetic construct
  source 1..30: mol_type = other DNA
caggacaagaccggcaccaactacaataac

SEQ ID NO: 777 - DNA, 30 bp, synthetic construct
  source 1..30: mol_type = other DNA
gtggacaagaccggcaccaactacaataac

SEQ ID NO: 778 - DNA, 30 bp, synthetic construct
  source 1..30: mol_type = other DNA
gcggacaagaccggcaccaactacaataac

SEQ ID NO: 779 - DNA, 30 bp, synthetic construct
  source 1..30: mol_type = other DNA
gatgacaagaccggcaccaactacaataac

SEQ ID NO: 780 - DNA, 30 bp, synthetic construct
  source 1..30: mol_type = other DNA
gaagacaagaccggcaccaactacaataac

SEQ ID NO: 781 - DNA, 30 bp, synthetic construct
  source 1..30: mol_type = other DNA
ggcgacaagaccggcaccaactacaataac

SEQ ID NO: 782 - DNA, 30 bp, synthetic construct
  source 1..30: mol_type = other DNA
tttgacaagaccggcaccaactacaataac

SEQ ID NO: 783 - DNA, 30 bp, synthetic construct
  source 1..30: mol_type = other DNA
tatgacaagaccggcaccaactacaataac

SEQ ID NO: 784 - DNA, 30 bp, synthetic construct
  source 1..30: mol_type = other DNA
tgcgacaagaccggcaccaactacaataac

SEQ ID NO: 785 - DNA, 30 bp, synthetic construct
  source 1..30: mol_type = other DNA
tggattaagaccggcaccaactacaataac

SEQ ID NO: 786 - DNA, 30 bp, synthetic construct
  source 1..30: mol_type = other DNA
tggatgaagaccggcaccaactacaataac

SEQ ID NO: 787 - DNA, 30 bp, synthetic construct
  source 1..30: mol_type = other DNA
tggaccaagaccggcaccaactacaataac

SEQ ID NO: 788 - DNA, 30 bp, synthetic construct
  source 1..30: mol_type = other DNA
tggaacaagaccggcaccaactacaataac

SEQ ID NO: 789 - DNA, 30 bp, synthetic construct
  source 1..30: mol_type = other DNA
tggaaaaagaccggcaccaactacaataac

SEQ ID NO: 790 - DNA, 30 bp, synthetic construct
  source 1..30: mol_type = other DNA
tggagcaagaccggcaccaactacaataac

SEQ ID NO: 791 - DNA, 30 bp, synthetic construct
  source 1..30: mol_type = other DNA
tggcgtaagaccggcaccaactacaataac

SEQ ID NO: 792 - DNA, 30 bp, synthetic construct
  source 1..30: mol_type = other DNA
tggctgaagaccggcaccaactacaataac

SEQ ID NO: 793 - DNA, 30 bp, synthetic construct
  source 1..30: mol_type = other DNA
tggccgaagaccggcaccaactacaataac

SEQ ID NO: 794 - DNA, 30 bp, synthetic construct
  source 1..30: mol_type = other DNA
tggcataagaccggcaccaactacaataac

SEQ ID NO: 795 - DNA, 30 bp, synthetic construct
  source 1..30: mol_type = other DNA
tggcagaagaccggcaccaactacaataac

SEQ ID NO: 796 - DNA, 30 bp, synthetic construct
  source 1..30: mol_type = other DNA
tgggtgaagaccggcaccaactacaataac

SEQ ID NO: 797 - DNA, 30 bp, synthetic construct
  source 1..30: mol_type = other DNA
tgggcgaagaccggcaccaactacaataac

SEQ ID NO: 798 - DNA, 30 bp, synthetic construct
  source 1..30: mol_type = other DNA
tgggaaaagaccggcaccaactacaataac

SEQ ID NO: 799 - DNA, 30 bp, synthetic construct
  source 1..30: mol_type = other DNA
tggggcaagaccggcaccaactacaataac

SEQ ID NO: 800 - DNA, 30 bp, synthetic construct
  source 1..30: mol_type = other DNA
tggtttaagaccggcaccaactacaataac

SEQ ID NO: 801 - DNA, 30 bp, synthetic construct
  source 1..30: mol_type = other DNA
tggtataagaccggcaccaactacaataac

SEQ ID NO: 802 - DNA, 30 bp, synthetic construct
  source 1..30: mol_type = other DNA
tggtgcaagaccggcaccaactacaataac

SEQ ID NO: 803 - DNA, 30 bp, synthetic construct
  source 1..30: mol_type = other DNA
tggtggaagaccggcaccaactacaataac

SEQ ID NO: 804 - DNA, 30 bp, synthetic construct
  source 1..30: mol_type = other DNA
tgggacattaccggcaccaactacaataac

SEQ ID NO: 805 - DNA, 30 bp, synthetic construct
  source 1..30: mol_type = other DNA
tgggacatgaccggcaccaactacaataac

SEQ ID NO: 806 - DNA, 30 bp, synthetic construct
  source 1..30: mol_type = other DNA
tgggacaccaccggcaccaactacaataac

SEQ ID NO: 807 - DNA, 30 bp, synthetic construct
  source 1..30: mol_type = other DNA
tgggacaacaccggcaccaactacaataac

SEQ ID NO: 808 - DNA, 30 bp, synthetic construct
  source 1..30: mol_type = other DNA
tgggacagcaccggcaccaactacaataac

SEQ ID NO: 809 - DNA, 30 bp, synthetic construct
  source 1..30: mol_type = other DNA
tgggaccgtaccggcaccaactacaataac

SEQ ID NO: 810 - DNA, 30 bp, synthetic construct
  source 1..30: mol_type = other DNA
tgggacctgaccggcaccaactacaataac

SEQ ID NO: 811 - DNA, 30 bp, synthetic construct
  source 1..30: mol_type = other DNA
tgggacccgaccggcaccaactacaataac

SEQ ID NO: 812 - DNA, 30 bp, synthetic construct
  source 1..30: mol_type = other DNA
tgggaccataccggcaccaactacaataac

SEQ ID NO: 813 - DNA, 30 bp, synthetic construct
  source 1..30: mol_type = other DNA
tgggaccagaccggcaccaactacaataac

SEQ ID NO: 814 - DNA, 30 bp, synthetic construct
  source 1..30: mol_type = other DNA
tgggacgtgaccggcaccaactacaataac

SEQ ID NO: 815 - DNA, 30 bp, synthetic construct
  source 1..30: mol_type = other DNA
tgggacgcgaccggcaccaactacaataac

SEQ ID NO: 816 - DNA, 30 bp, synthetic construct
  source 1..30: mol_type = other DNA
tgggacgataccggcaccaactacaataac

SEQ ID NO: 817 - DNA, 30 bp, synthetic construct
  source 1..30: mol_type = other DNA
tgggacgaaaccggcaccaactacaataac

SEQ ID NO: 818 - DNA, 30 bp, synthetic construct
  source 1..30: mol_type = other DNA
tgggacggcaccggcaccaactacaataac

SEQ ID NO: 819 - DNA, 30 bp, synthetic construct
  source 1..30: mol_type = other DNA
tgggactttaccggcaccaactacaataac

SEQ ID NO: 820 - DNA, 30 bp, synthetic construct
  source 1..30: mol_type = other DNA
tgggactataccggcaccaactacaataac

SEQ ID NO: 821 - DNA, 30 bp, synthetic construct
  source 1..30: mol_type = other DNA
tgggactgcaccggcaccaactacaataac

SEQ ID NO: 822 - DNA, 30 bp, synthetic construct
  source 1..30: mol_type = other DNA
tgggactggaccggcaccaactacaataac

SEQ ID NO: 823 - DNA, 30 bp, synthetic construct
  source 1..30: mol_type = other DNA
tgggacaagattggcaccaactacaataac

SEQ ID NO: 824 - DNA, 30 bp, synthetic construct
  source 1..30: mol_type = other DNA
tgggacaagatgggcaccaactacaataac

SEQ ID NO: 825 - DNA, 30 bp, synthetic construct
  source 1..30: mol_type = other DNA
tgggacaagaacggcaccaactacaataac

SEQ ID NO: 826 - DNA, 30 bp, synthetic construct
  source 1..30: mol_type = other DNA
tgggacaagaaaggcaccaactacaataac

SEQ ID NO: 827 - DNA, 30 bp, synthetic construct
  source 1..30: mol_type = other DNA
tgggacaagagcggcaccaactacaataac

SEQ ID NO: 828 - DNA, 30 bp, synthetic construct
  source 1..30: mol_type = other DNA
tgggacaagcgtggcaccaactacaataac

SEQ ID NO: 829 - DNA, 30 bp, synthetic construct
  source 1..30: mol_type = other DNA
tgggacaagctgggcaccaactacaataac

SEQ ID NO: 830 - DNA, 30 bp, synthetic construct
  source 1..30: mol_type = other DNA
tgggacaagccgggcaccaactacaataac

SEQ ID NO: 831 - DNA, 30 bp, synthetic construct
  source 1..30: mol_type = other DNA
tgggacaagcatggcaccaactacaataac

SEQ ID NO: 832 - DNA, 30 bp, synthetic construct
  source 1..30: mol_type = other DNA
tgggacaagcagggcaccaactacaataac

SEQ ID NO: 833 - DNA, 30 bp, synthetic construct
  source 1..30: mol_type = other DNA
tgggacaaggtgggcaccaactacaataac

SEQ ID NO: 834 - DNA, 30 bp, synthetic construct
  source 1..30: mol_type = other DNA
tgggacaaggcgggcaccaactacaataac

SEQ ID NO: 835 - DNA, 30 bp, synthetic construct
  source 1..30: mol_type = other DNA
tgggacaaggatggcaccaactacaataac

SEQ ID NO: 836 - DNA, 30 bp, synthetic construct
  source 1..30: mol_type = other DNA
tgggacaaggaaggcaccaactacaataac

SEQ ID NO: 837 - DNA, 30 bp, synthetic construct
  source 1..30: mol_type = other DNA
tgggacaagggcggcaccaactacaataac

SEQ ID NO: 838 - DNA, 30 bp, synthetic construct
  source 1..30: mol_type = other DNA
tgggacaagtttggcaccaactacaataac

SEQ ID NO: 839 - DNA, 30 bp, synthetic construct
  source 1..30: mol_type = other DNA
tgggacaagtatggcaccaactacaataac

SEQ ID NO: 840 - DNA, 30 bp, synthetic construct
  source 1..30: mol_type = other DNA
tgggacaagtgcggcaccaactacaataac

SEQ ID NO: 841 - DNA, 30 bp, synthetic construct
  source 1..30: mol_type = other DNA
tgggacaagtggggcaccaactacaataac

SEQ ID NO: 842 - DNA, 30 bp, synthetic construct
  source 1..30: mol_type = other DNA
tgggacaagaccattaccaactacaataac

SEQ ID NO: 843 - DNA, 30 bp, synthetic construct
  source 1..30: mol_type = other DNA
tgggacaagaccatgaccaactacaataac

SEQ ID NO: 844 - DNA, 30 bp, synthetic construct
  source 1..30: mol_type = other DNA
tgggacaagaccaccaccaactacaataac

SEQ ID NO: 845 - DNA, 30 bp, synthetic construct
  source 1..30: mol_type = other DNA
tgggacaagaccaacaccaactacaataac

SEQ ID NO: 846 - DNA, 30 bp, synthetic construct
  source 1..30: mol_type = other DNA
tgggacaagaccaaaaccaactacaataac

SEQ ID NO: 847 - DNA, 30 bp, synthetic construct
  source 1..30: mol_type = other DNA
tgggacaagaccagcaccaactacaataac

SEQ ID NO: 848 - DNA, 30 bp, synthetic construct
  source 1..30: mol_type = other DNA
tgggacaagacccgtaccaactacaataac

SEQ ID NO: 849 - DNA, 30 bp, synthetic construct
  source 1..30: mol_type = other DNA
tgggacaagaccctgaccaactacaataac

SEQ ID NO: 850 - DNA, 30 bp, synthetic construct
  source 1..30: mol_type = other DNA
tgggacaagaccccgaccaactacaataac

SEQ ID NO: 851 - DNA, 30 bp, synthetic construct
  source 1..30: mol_type = other DNA
tgggacaagacccataccaactacaataac

SEQ ID NO: 852 - DNA, 30 bp, synthetic construct
  source 1..30: mol_type = other DNA
tgggacaagacccagaccaactacaataac

SEQ ID NO: 853 - DNA, 30 bp, synthetic construct
  source 1..30: mol_type = other DNA
tgggacaagaccgtgaccaactacaataac

SEQ ID NO: 854 - DNA, 30 bp, synthetic construct
  source 1..30: mol_type = other DNA
tgggacaagaccgcgaccaactacaataac

SEQ ID NO: 855 - DNA, 30 bp, synthetic construct
  source 1..30: mol_type = other DNA
tgggacaagaccgataccaactacaataac

SEQ ID NO: 856 - DNA, 30 bp, synthetic construct
  source 1..30: mol_type = other DNA
tgggacaagaccgaaaccaactacaataac

SEQ ID NO: 857 - DNA, 30 bp, synthetic construct
  source 1..30: mol_type = other DNA
tgggacaagacctttaccaactacaataac

SEQ ID NO: 858 - DNA, 30 bp, synthetic construct
  source 1..30: mol_type = other DNA
tgggacaagacctataccaactacaataac

SEQ ID NO: 859 - DNA, 30 bp, synthetic construct
  source 1..30: mol_type = other DNA
tgggacaagacctgcaccaactacaataac

SEQ ID NO: 860 - DNA, 30 bp, synthetic construct
  source 1..30: mol_type = other DNA
tgggacaagacctggaccaactacaataac

SEQ ID NO: 861 - DNA, 30 bp, synthetic construct
  source 1..30: mol_type = other DNA
tgggacaagaccggcattaactacaataac

SEQ ID NO: 862 - DNA, 30 bp, synthetic construct
  source 1..30: mol_type = other DNA
tgggacaagaccggcatgaactacaataac

SEQ ID NO: 863 - DNA, 30 bp, synthetic construct
  source 1..30: mol_type = other DNA
tgggacaagaccggcaacaactacaataac

SEQ ID NO: 864 - DNA, 30 bp, synthetic construct
  source 1..30: mol_type = other DNA
tgggacaagaccggcaaaaactacaataac

SEQ ID NO: 865 - DNA, 30 bp, synthetic construct
  source 1..30: mol_type = other DNA
tgggacaagaccggcagcaactacaataac

SEQ ID NO: 866 - DNA, 30 bp, synthetic construct
  source 1..30: mol_type = other DNA
tgggacaagaccggccgtaactacaataac

SEQ ID NO: 867 - DNA, 30 bp, synthetic construct
  source 1..30: mol_type = other DNA
tgggacaagaccggcctgaactacaataac

SEQ ID NO: 868 - DNA, 30 bp, synthetic construct
  source 1..30: mol_type = other DNA
tgggacaagaccggcccgaactacaataac

SEQ ID NO: 869 - DNA, 30 bp, synthetic construct
  source 1..30: mol_type = other DNA
tgggacaagaccggccataactacaataac

SEQ ID NO: 870 - DNA, 30 bp, synthetic construct
  source 1..30: mol_type = other DNA
tgggacaagaccggccagaactacaataac

SEQ ID NO: 871 - DNA, 30 bp, synthetic construct
  source 1..30: mol_type = other DNA
tgggacaagaccggcgtgaactacaataac

SEQ ID NO: 872 - DNA, 30 bp, synthetic construct
  source 1..30: mol_type = other DNA
tgggacaagaccggcgcgaactacaataac

SEQ ID NO: 873 - DNA, 30 bp, synthetic construct
  source 1..30: mol_type = other DNA
tgggacaagaccggcgataactacaataac

SEQ ID NO: 874 - DNA, 30 bp, synthetic construct
  source 1..30: mol_type = other DNA
tgggacaagaccggcgaaaactacaataac

SEQ ID NO: 875 - DNA, 30 bp, synthetic construct
  source 1..30: mol_type = other DNA
tgggacaagaccggcggcaactacaataac

SEQ ID NO: 876 - DNA, 30 bp, synthetic construct
  source 1..30: mol_type = other DNA
tgggacaagaccggctttaactacaataac

SEQ ID NO: 877 - DNA, 30 bp, synthetic construct
  source 1..30: mol_type = other DNA
tgggacaagaccggctataactacaataac

SEQ ID NO: 878 - DNA, 30 bp, synthetic construct
  source 1..30: mol_type = other DNA
tgggacaagaccggctgcaactacaataac

SEQ ID NO: 879 - DNA, 30 bp, synthetic construct
  source 1..30: mol_type = other DNA
tgggacaagaccggctggaactacaataac

SEQ ID NO: 880 - DNA, 30 bp, synthetic construct
  source 1..30: mol_type = other DNA
tgggacaagaccggcaccatttacaataac

SEQ ID NO: 881 - DNA, 30 bp, synthetic construct
  source 1..30: mol_type = other DNA
tgggacaagaccggcaccatgtacaataac

SEQ ID NO: 882 - DNA, 30 bp, synthetic construct
  source 1..30: mol_type = other DNA
tgggacaagaccggcaccacctacaataac

SEQ ID NO: 883 - DNA, 30 bp, synthetic construct
  source 1..30: mol_type = other DNA
tgggacaagaccggcaccaaatacaataac

SEQ ID NO: 884 - DNA, 30 bp, synthetic construct
  source 1..30: mol_type = other DNA
tgggacaagaccggcaccagctacaataac

SEQ ID NO: 885 - DNA, 30 bp, synthetic construct
  source 1..30: mol_type = other DNA
tgggacaagaccggcacccgttacaataac

SEQ ID NO: 886 - DNA, 30 bp, synthetic construct
  source 1..30: mol_type = other DNA
tgggacaagaccggcaccctgtacaataac

SEQ ID NO: 887 - DNA, 30 bp, synthetic construct
  source 1..30: mol_type = other DNA
tgggacaagaccggcaccccgtacaataac

SEQ ID NO: 888 - DNA, 30 bp, synthetic construct
  source 1..30: mol_type = other DNA
tgggacaagaccggcacccattacaataac

SEQ ID NO: 889 - DNA, 30 bp, synthetic construct
  source 1..30: mol_type = other DNA
tgggacaagaccggcacccagtacaataac

SEQ ID NO: 890 - DNA, 30 bp, synthetic construct
  source 1..30: mol_type = other DNA
tgggacaagaccggcaccgtgtacaataac

SEQ ID NO: 891 - DNA, 30 bp, synthetic construct
  source 1..30: mol_type = other DNA
tgggacaagaccggcaccgcgtacaataac

SEQ ID NO: 892 - DNA, 30 bp, synthetic construct
  source 1..30: mol_type = other DNA
tgggacaagaccggcaccgattacaataac

SEQ ID NO: 893 - DNA, 30 bp, synthetic construct
  source 1..30: mol_type = other DNA
tgggacaagaccggcaccgaatacaataac

SEQ ID NO: 894 - DNA, 30 bp, synthetic construct
  source 1..30: mol_type = other DNA
tgggacaagaccggcaccggctacaataac

SEQ ID NO: 895 - DNA, 30 bp, synthetic construct
  source 1..30: mol_type = other DNA
tgggacaagaccggcaccttttacaataac

SEQ ID NO: 896 - DNA, 30 bp, synthetic construct
  source 1..30: mol_type = other DNA
tgggacaagaccggcacctattacaataac

SEQ ID NO: 897 - DNA, 30 bp, synthetic construct
  source 1..30: mol_type = other DNA
tgggacaagaccggcacctgctacaataac

SEQ ID NO: 898 - DNA, 30 bp, synthetic construct
  source 1..30: mol_type = other DNA
tgggacaagaccggcacctggtacaataac

SEQ ID NO: 899 - DNA, 30 bp, synthetic construct
  source 1..30: mol_type = other DNA
tgggacaagaccggcaccaacattaataac

SEQ ID NO: 900 - DNA, 30 bp, synthetic construct
  source 1..30: mol_type = other DNA
tgggacaagaccggcaccaacatgaataac

SEQ ID NO: 901 - DNA, 30 bp, synthetic construct
  source 1..30: mol_type = other DNA
tgggacaagaccggcaccaacaccaataac

SEQ ID NO: 902 - DNA, 30 bp, synthetic construct
  source 1..30: mol_type = other DNA
tgggacaagaccggcaccaacaacaataac

SEQ ID NO: 903 - DNA, 30 bp, synthetic construct
  source 1..30: mol_type = other DNA
tgggacaagaccggcaccaacaaaaataac

SEQ ID NO: 904 - DNA, 30 bp, synthetic construct
  source 1..30: mol_type = other DNA
tgggacaagaccggcaccaacagcaataac

SEQ ID NO: 905 - DNA, 30 bp, synthetic construct
  source 1..30: mol_type = other DNA
tgggacaagaccggcaccaaccgtaataac

SEQ ID NO: 906 - DNA, 30 bp, synthetic construct
  source 1..30: mol_type = other DNA
tgggacaagaccggcaccaacctgaataac

SEQ ID NO: 907 - DNA, 30 bp, synthetic construct
  source 1..30: mol_type = other DNA
tgggacaagaccggcaccaacccgaataac

SEQ ID NO: 908 - DNA, 30 bp, synthetic construct
  source 1..30: mol_type = other DNA
tgggacaagaccggcaccaaccataataac

SEQ ID NO: 909 - DNA, 30 bp, synthetic construct
  source 1..30: mol_type = other DNA
tgggacaagaccggcaccaaccagaataac

SEQ ID NO: 910 - DNA, 30 bp, synthetic construct
  source 1..30: mol_type = other DNA
tgggacaagaccggcaccaacgtgaataac

SEQ ID NO: 911 - DNA, 30 bp, synthetic construct
  source 1..30: mol_type = other DNA
tgggacaagaccggcaccaacgcgaataac

SEQ ID NO: 912 - DNA, 30 bp, synthetic construct
  source 1..30: mol_type = other DNA
tgggacaagaccggcaccaacgataataac

SEQ ID NO: 913 - DNA, 30 bp, synthetic construct
  source 1..30: mol_type = other DNA
tgggacaagaccggcaccaacgaaaataac

SEQ ID NO: 914 - DNA, 30 bp, synthetic construct
  source 1..30: mol_type = other DNA
tgggacaagaccggcaccaacggcaataac

SEQ ID NO: 915 - DNA, 30 bp, synthetic construct
  source 1..30: mol_type = other DNA
tgggacaagaccggcaccaactttaataac

SEQ ID NO: 916 - DNA, 30 bp, synthetic construct
  source 1..30: mol_type = other DNA
tgggacaagaccggcaccaactgcaataac

SEQ ID NO: 917 - DNA, 30 bp, synthetic construct
  source 1..30: mol_type = other DNA
tgggacaagaccggcaccaactggaataac

SEQ ID NO: 918 - DNA, 30 bp, synthetic construct
  source 1..30: mol_type = other DNA
tgggacaagaccggcaccaactacattaac

SEQ ID NO: 919 - DNA, 30 bp, synthetic construct
  source 1..30: mol_type = other DNA
tgggacaagaccggcaccaactacatgaac

SEQ ID NO: 920 - DNA, 30 bp, synthetic construct
  source 1..30: mol_type = other DNA
tgggacaagaccggcaccaactacaccaac

SEQ ID NO: 921 - DNA, 30 bp, synthetic construct
  source 1..30: mol_type = other DNA
tgggacaagaccggcaccaactacaaaaac

SEQ ID NO: 922 - DNA, 30 bp, synthetic construct
  source 1..30: mol_type = other DNA
tgggacaagaccggcaccaactacagcaac

SEQ ID NO: 923 - DNA, 30 bp, synthetic construct
  source 1..30: mol_type = other DNA
tgggacaagaccggcaccaactaccgtaac

SEQ ID NO: 924 - DNA, 30 bp, synthetic construct
  source 1..30: mol_type = other DNA
tgggacaagaccggcaccaactacctgaac

SEQ ID NO: 925 - DNA, 30 bp, synthetic construct
  source 1..30: mol_type = other DNA
tgggacaagaccggcaccaactacccgaac

SEQ ID NO: 926 - DNA, 30 bp, synthetic construct
  source 1..30: mol_type = other DNA
tgggacaagaccggcaccaactaccataac

SEQ ID NO: 927 - DNA, 30 bp, synthetic construct
  source 1..30: mol_type = other DNA
tgggacaagaccggcaccaactaccagaac

SEQ ID NO: 928 - DNA, 30 bp, synthetic construct
  source 1..30: mol_type = other DNA
tgggacaagaccggcaccaactacgtgaac

SEQ ID NO: 929 - DNA, 30 bp, synthetic construct
  source 1..30: mol_type = other DNA
tgggacaagaccggcaccaactacgcgaac

SEQ ID NO: 930 - DNA, 30 bp, synthetic construct
  source 1..30: mol_type = other DNA
tgggacaagaccggcaccaactacgataac

SEQ ID NO: 931 - DNA, 30 bp, synthetic construct
  source 1..30: mol_type = other DNA
tgggacaagaccggcaccaactacgaaaac

SEQ ID NO: 932 - DNA, 30 bp, synthetic construct
  source 1..30: mol_type = other DNA
tgggacaagaccggcaccaactacggcaac

SEQ ID NO: 933 - DNA, 30 bp, synthetic construct
  source 1..30: mol_type = other DNA
tgggacaagaccggcaccaactactttaac

SEQ ID NO: 934 - DNA, 30 bp, synthetic construct
  source 1..30: mol_type = other DNA
tgggacaagaccggcaccaactactataac

SEQ ID NO: 935 - DNA, 30 bp, synthetic construct
  source 1..30: mol_type = other DNA
tgggacaagaccggcaccaactactgcaac

SEQ ID NO: 936 - DNA, 30 bp, synthetic construct
  source 1..30: mol_type = other DNA
tgggacaagaccggcaccaactactggaac

SEQ ID NO: 937 - DNA, 30 bp, synthetic construct
  source 1..30: mol_type = other DNA
tgggacaagaccggcaccaactacaatatt

SEQ ID NO: 938 - DNA, 30 bp, synthetic construct
  source 1..30: mol_type = other DNA
tgggacaagaccggcaccaactacaatatg

SEQ ID NO: 939 - DNA, 30 bp, synthetic construct
  source 1..30: mol_type = other DNA
tgggacaagaccggcaccaactacaatacc

SEQ ID NO: 940 - DNA, 30 bp, synthetic construct
  source 1..30: mol_type = other DNA
tgggacaagaccggcaccaactacaataaa

SEQ ID NO: 941 - DNA, 30 bp, synthetic construct
  source 1..30: mol_type = other DNA
tgggacaagaccggcaccaactacaatagc

SEQ ID NO: 942 - DNA, 30 bp, synthetic construct
  source 1..30: mol_type = other DNA
tgggacaagaccggcaccaactacaatcgt

SEQ ID NO: 943 - DNA, 30 bp, synthetic construct
  source 1..30: mol_type = other DNA
tgggacaagaccggcaccaactacaatctg

SEQ ID NO: 944 - DNA, 30 bp, synthetic construct
  source 1..30: mol_type = other DNA
tgggacaagaccggcaccaactacaatccg

SEQ ID NO: 945 - DNA, 30 bp, synthetic construct
  source 1..30: mol_type = other DNA
tgggacaagaccggcaccaactacaatcat

SEQ ID NO: 946 - DNA, 30 bp, synthetic construct
  source 1..30: mol_type = other DNA
tgggacaagaccggcaccaactacaatcag

SEQ ID NO: 947 - DNA, 30 bp, synthetic construct
  source 1..30: mol_type = other DNA
tgggacaagaccggcaccaactacaatgtg

SEQ ID NO: 948 - DNA, 30 bp, synthetic construct
  source 1..30: mol_type = other DNA
tgggacaagaccggcaccaactacaatgcg

SEQ ID NO: 949 - DNA, 30 bp, synthetic construct
  source 1..30: mol_type = other DNA
tgggacaagaccggcaccaactacaatgat

SEQ ID NO: 950 - DNA, 30 bp, synthetic construct
  source 1..30: mol_type = other DNA
tgggacaagaccggcaccaactacaatgaa

SEQ ID NO: 951 - DNA, 30 bp, synthetic construct
  source 1..30: mol_type = other DNA
tgggacaagaccggcaccaactacaatggc

SEQ ID NO: 952 - DNA, 30 bp, synthetic construct
  source 1..30: mol_type = other DNA
tgggacaagaccggcaccaactacaatttt

SEQ ID NO: 953 - DNA, 30 bp, synthetic construct
  source 1..30: mol_type = other DNA
tgggacaagaccggcaccaactacaattat

SEQ ID NO: 954 - DNA, 30 bp, synthetic construct
  source 1..30: mol_type = other DNA
tgggacaagaccggcaccaactacaattgc

SEQ ID NO: 955 - DNA, 30 bp, synthetic construct
  source 1..30: mol_type = other DNA
tgggacaagaccggcaccaactacaattgg

SEQ ID NO: 956 - DNA, 30 bp, Bacillus subtilis
  source 1..30: mol_type = genomic DNA
ggcccggttctgagccgttttgtccagaaa

SEQ ID NO: 957 - DNA, 30 bp, synthetic construct
  source 1..30: mol_type = other DNA
attccggttctgagccgttttgtccagaaa

SEQ ID NO: 958 - DNA, 30 bp, synthetic construct
  source 1..30: mol_type = other DNA
atgccggttctgagccgttttgtccagaaa

SEQ ID NO: 959 - DNA, 30 bp, synthetic construct
  source 1..30: mol_type = other DNA
accccggttctgagccgttttgtccagaaa

SEQ ID NO: 960 - DNA, 30 bp, synthetic construct
  source 1..30: mol_type = other DNA
aacccggttctgagccgttttgtccagaaa

SEQ ID NO: 961 - DNA, 30 bp, synthetic construct
  source 1..30: mol_type = other DNA
aaaccggttctgagccgttttgtccagaaa

SEQ ID NO: 962 - DNA, 30 bp, synthetic construct
  source 1..30: mol_type = other DNA
agcccggttctgagccgttttgtccagaaa

SEQ ID NO: 963 - DNA, 30 bp, synthetic construct
  source 1..30: mol_type = other DNA
cgtccggttctgagccgttttgtccagaaa

SEQ ID NO: 964 - DNA, 30 bp, synthetic construct
  source 1..30: mol_type = other DNA
ctgccggttctgagccgttttgtccagaaa

SEQ ID NO: 965 - DNA, 30 bp, synthetic construct
  source 1..30: mol_type = other DNA
ccgccggttctgagccgttttgtccagaaa

SEQ ID NO: 966 - DNA, 30 bp, synthetic construct
  source 1..30: mol_type = other DNA
catccggttctgagccgttttgtccagaaa

SEQ ID NO: 967 - DNA, 30 bp, synthetic construct
  source 1..30: mol_type = other DNA
cagccggttctgagccgttttgtccagaaa

SEQ ID NO: 968 - DNA, 30 bp, synthetic construct
  source 1..30: mol_type = other DNA
gtgccggttctgagccgttttgtccagaaa

SEQ ID NO: 969 - DNA, 30 bp, synthetic construct
  source 1..30: mol_type = other DNA
gcgccggttctgagccgttttgtccagaaa

SEQ ID NO: 970 - DNA, 30 bp, synthetic construct
  source 1..30: mol_type = other DNA
gatccggttctgagccgttttgtccagaaa

SEQ ID NO: 971 - DNA, 30 bp, synthetic construct
  source 1..30: mol_type = other DNA
gaaccggttctgagccgttttgtccagaaa

SEQ ID NO: 972 - DNA, 30 bp, synthetic construct
  source 1..30: mol_type = other DNA
tttccggttctgagccgttttgtccagaaa

SEQ ID NO: 973 - DNA, 30 bp, synthetic construct
  source 1..30: mol_type = other DNA
tatccggttctgagccgttttgtccagaaa

SEQ ID NO: 974 - DNA, 30 bp, synthetic construct
  source 1..30: mol_type = other DNA
tgcccggttctgagccgttttgtccagaaa

SEQ ID NO: 975 - DNA, 30 bp, synthetic construct
  source 1..30: mol_type = other DNA
tggccggttctgagccgttttgtccagaaa

SEQ ID NO: 976 - DNA, 30 bp, synthetic construct
  source 1..30: mol_type = other DNA
ggcattgttctgagccgttttgtccagaaa

SEQ ID NO: 977 - DNA, 30 bp, synthetic construct
  source 1..30: mol_type = other DNA
ggcatggttctgagccgttttgtccagaaa

SEQ ID NO: 978 - DNA, 30 bp, synthetic construct
  source 1..30: mol_type = other DNA
ggcaccgttctgagccgttttgtccagaaa

SEQ ID NO: 979 - DNA, 30 bp, synthetic construct
  source 1..30: mol_type = other DNA
ggcaacgttctgagccgttttgtccagaaa

SEQ ID NO: 980 - DNA, 30 bp, synthetic construct
  source 1..30: mol_type = other DNA
ggcaaagttctgagccgttttgtccagaaa

SEQ ID NO: 981 - DNA, 30 bp, synthetic construct
  source 1..30: mol_type = other DNA
ggcagcgttctgagccgttttgtccagaaa

SEQ ID NO: 982 - DNA, 30 bp, synthetic construct
  source 1..30: mol_type = other DNA
ggccgtgttctgagccgttttgtccagaaa

SEQ ID NO: 983 - DNA, 30 bp, synthetic construct
  source 1..30: mol_type = other DNA
ggcctggttctgagccgttttgtccagaaa

SEQ ID NO: 984 - DNA, 30 bp, synthetic construct
  source 1..30: mol_type = other DNA
ggccatgttctgagccgttttgtccagaaa

SEQ ID NO: 985 - DNA, 30 bp, synthetic construct
  source 1..30: mol_type = other DNA
ggccaggttctgagccgttttgtccagaaa

SEQ ID NO: 986 - DNA, 30 bp, synthetic construct
  source 1..30: mol_type = other DNA
ggcgtggttctgagccgttttgtccagaaa

SEQ ID NO: 987 - DNA, 30 bp, synthetic construct
  source 1..30: mol_type = other DNA
ggcgcggttctgagccgttttgtccagaaa

SEQ ID NO: 988 - DNA, 30 bp, synthetic construct
  source 1..30: mol_type = other DNA
ggcgatgttctgagccgttttgtccagaaa

SEQ ID NO: 989 - DNA, 30 bp, synthetic construct
  source 1..30: mol_type = other DNA
ggcgaagttctgagccgttttgtccagaaa

SEQ ID NO: 990 - DNA, 30 bp, synthetic construct
  source 1..30: mol_type = other DNA
ggcggcgttctgagccgttttgtccagaaa

SEQ ID NO: 991 - DNA, 30 bp, synthetic construct
  source 1..30: mol_type = other DNA
ggctttgttctgagccgttttgtccagaaa

SEQ ID NO: 992 - DNA, 30 bp, synthetic construct
  source 1..30: mol_type = other DNA
ggctatgttctgagccgttttgtccagaaa

SEQ ID NO: 993 - DNA, 30 bp, synthetic construct
  source 1..30: mol_type = other DNA
ggctgcgttctgagccgttttgtccagaaa

SEQ ID NO: 994 - DNA, 30 bp, synthetic construct
  source 1..30: mol_type = other DNA
ggctgggttctgagccgttttgtccagaaa

SEQ ID NO: 995 - DNA, 30 bp, synthetic construct
  source 1..30: mol_type = other DNA
ggcccgattctgagccgttttgtccagaaa

SEQ ID NO: 996 - DNA, 30 bp, synthetic construct
  source 1..30: mol_type = other DNA
ggcccgatgctgagccgttttgtccagaaa

SEQ ID NO: 997 - DNA, 30 bp, synthetic construct
  source 1..30: mol_type = other DNA
ggcccgaccctgagccgttttgtccagaaa

SEQ ID NO: 998 - DNA, 30 bp, synthetic construct
  source 1..30: mol_type = other DNA
ggcccgaacctgagccgttttgtccagaaa

SEQ ID NO: 999 - DNA, 30 bp, synthetic construct
  source 1..30: mol_type = other DNA
ggcccgaaactgagccgttttgtccagaaa

SEQ ID NO: 1000 - DNA, 30 bp, synthetic construct
  source 1..30: mol_type = other DNA
ggcccgagcctgagccgttttgtccagaaa

SEQ ID NO: 1001 - DNA, 30 bp, synthetic construct
  source 1..30: mol_type = other DNA
ggcccgcgtctgagccgttttgtccagaaa

SEQ ID NO: 1002 - DNA, 30 bp, synthetic construct
  source 1..30: mol_type = other DNA
ggcccgctgctgagccgttttgtccagaaa

SEQ ID NO: 1003 - DNA, 30 bp, synthetic construct
  source 1..30: mol_type = other DNA
ggcccgccgctgagccgttttgtccagaaa

SEQ ID NO: 1004 - DNA, 30 bp, synthetic construct
  source 1..30: mol_type = other DNA
ggcccgcatctgagccgttttgtccagaaa

SEQ ID NO: 1005 - DNA, 30 bp, synthetic construct
  source 1..30: mol_type = other DNA
ggcccgcagctgagccgttttgtccagaaa

SEQ ID NO: 1006 - DNA, 30 bp, synthetic construct
  source 1..30: mol_type = other DNA
ggcccggcgctgagccgttttgtccagaaa

SEQ ID NO: 1007 - DNA, 30 bp, synthetic construct
  source 1..30: mol_type = other DNA
ggcccggatctgagccgttttgtccagaaa

SEQ ID NO: 1008 - DNA, 30 bp, synthetic construct
  source 1..30: mol_type = other DNA
ggcccggaactgagccgttttgtccagaaa

SEQ ID NO: 1009 - DNA, 30 bp, synthetic construct
  source 1..30: mol_type = other DNA
ggcccgggcctgagccgttttgtccagaaa

SEQ ID NO: 1010 - DNA, 30 bp, synthetic construct
  source 1..30: mol_type = other DNA
ggcccgtttctgagccgttttgtccagaaa

SEQ ID NO: 1011 - DNA, 30 bp, synthetic construct
  source 1..30: mol_type = other DNA
ggcccgtatctgagccgttttgtccagaaa

SEQ ID NO: 1012 - DNA, 30 bp, synthetic construct
  source 1..30: mol_type = other DNA
ggcccgtgcctgagccgttttgtccagaaa

SEQ ID NO: 1013 - DNA, 30 bp, synthetic construct
  source 1..30: mol_type = other DNA
ggcccgtggctgagccgttttgtccagaaa

SEQ ID NO: 1014 - DNA, 30 bp, synthetic construct
  source 1..30: mol_type = other DNA
ggcccggttattagccgttttgtccagaaa

SEQ ID NO: 1015 - DNA, 30 bp, synthetic construct
  source 1..30: mol_type = other DNA
ggcccggttatgagccgttttgtccagaaa

SEQ ID NO: 1016 - DNA, 30 bp, synthetic construct
  source 1..30: mol_type = other DNA
ggcccggttaccagccgttttgtccagaaa

SEQ ID NO: 1017 - DNA, 30 bp, synthetic construct
  source 1..30: mol_type = other DNA
ggcccggttaacagccgttttgtccagaaa

SEQ ID NO: 1018 - DNA, 30 bp, synthetic construct
  source 1..30: mol_type = other DNA
ggcccggttaaaagccgttttgtccagaaa

SEQ ID NO: 1019 - DNA, 30 bp, synthetic construct
  source 1..30: mol_type = other DNA
ggcccggttagcagccgttttgtccagaaa

SEQ ID NO: 1020 - DNA, 30 bp, synthetic construct
  source 1..30: mol_type = other DNA
ggcccggttcgtagccgttttgtccagaaa

SEQ ID NO: 1021 - DNA, 30 bp, synthetic construct
  source 1..30: mol_type = other DNA
ggcccggttccgagccgttttgtccagaaa

SEQ ID NO: 1022 - DNA, 30 bp, synthetic construct
  source 1..30: mol_type = other DNA
ggcccggttcatagccgttttgtccagaaa

SEQ ID NO: 1023 - DNA, 30 bp, synthetic construct
  source 1..30: mol_type = other DNA
ggcccggttcagagccgttttgtccagaaa

SEQ ID NO: 1024 - DNA, 30 bp, synthetic construct
  source 1..30: mol_type = other DNA
ggcccggttgtgagccgttttgtccagaaa

SEQ ID NO: 1025 - DNA, 30 bp, synthetic construct
  source 1..30: mol_type = other DNA
ggcccggttgcgagccgttttgtccagaaa

SEQ ID NO: 1026 - DNA, 30 bp, synthetic construct
  source 1..30: mol_type = other DNA
ggcccggttgatagccgttttgtccagaaa

SEQ ID NO: 1027 - DNA, 30 bp, synthetic construct
  source 1..30: mol_type = other DNA
ggcccggttgaaagccgttttgtccagaaa

SEQ ID NO: 1028 - DNA, 30 bp, synthetic construct
  source 1..30: mol_type = other DNA
ggcccggttggcagccgttttgtccagaaa

SEQ ID NO: 1029 - DNA, 30 bp, synthetic construct
  source 1..30: mol_type = other DNA
ggcccggtttttagccgttttgtccagaaa

SEQ ID NO: 1030 - DNA, 30 bp, synthetic construct
  source 1..30: mol_type = other DNA
ggcccggtttatagccgttttgtccagaaa

SEQ ID NO: 1031 - DNA, 30 bp, synthetic construct
  source 1..30: mol_type = other DNA
ggcccggtttgcagccgttttgtccagaaa

SEQ ID NO: 1032 - DNA, 30 bp, synthetic construct
  source 1..30: mol_type = other DNA
ggcccggtttggagccgttttgtccagaaa

SEQ ID NO: 1033 - DNA, 30 bp, synthetic construct
  source 1..30: mol_type = other DNA
ggcccggttctgattcgttttgtccagaaa

SEQ ID NO: 1034 - DNA, 30 bp, synthetic construct
  source 1..30: mol_type = other DNA
ggcccggttctgatgcgttttgtccagaaa

SEQ ID NO: 1035 - DNA, 30 bp, synthetic construct
  source 1..30: mol_type = other DNA
ggcccggttctgacccgttttgtccagaaa

SEQ ID NO: 1036 - DNA, 30 bp, synthetic construct
  source 1..30: mol_type = other DNA
ggcccggttctgaaccgttttgtccagaaa

SEQ ID NO: 1037 - DNA, 30 bp, synthetic construct
  source 1..30: mol_type = other DNA
ggcccggttctgaaacgttttgtccagaaa

SEQ ID NO: 1038 - DNA, 30 bp, synthetic construct
  source 1..30: mol_type = other DNA
ggcccggttctgcgtcgttttgtccagaaa

SEQ ID NO: 1039 - DNA, 30 bp, synthetic construct
  source 1..30: mol_type = other DNA
ggcccggttctgctgcgttttgtccagaaa

SEQ ID NO: 1040 - DNA, 30 bp, synthetic construct
  source 1..30: mol_type = other DNA
ggcccggttctgccgcgttttgtccagaaa

SEQ ID NO: 1041 - DNA, 30 bp, synthetic construct
  source 1..30: mol_type = other DNA
ggcccggttctgcatcgttttgtccagaaa

SEQ ID NO: 1042 - DNA, 30 bp, synthetic construct
  source 1..30: mol_type = other DNA
ggcccggttctgcagcgttttgtccagaaa

SEQ ID NO: 1043 - DNA, 30 bp, synthetic construct
  source 1..30: mol_type = other DNA
ggcccggttctggtgcgttttgtccagaaa

SEQ ID NO: 1044 - DNA, 30 bp, synthetic construct
  source 1..30: mol_type = other DNA
ggcccggttctggcgcgttttgtccagaaa

SEQ ID NO: 1045 - DNA, 30 bp, synthetic construct
  source 1..30: mol_type = other DNA
ggcccggttctggatcgttttgtccagaaa

SEQ ID NO: 1046 - DNA, 30 bp, synthetic construct
  source 1..30: mol_type = other DNA
ggcccggttctggaacgttttgtccagaaa

SEQ ID NO: 1047 - DNA, 30 bp, synthetic construct
  source 1..30: mol_type = other DNA
ggcccggttctgggccgttttgtccagaaa

SEQ ID NO: 1048 - DNA, 30 bp, synthetic construct
  source 1..30: mol_type = other DNA
ggcccggttctgtttcgttttgtccagaaa

SEQ ID NO: 1049 - DNA, 30 bp, synthetic construct
  source 1..30: mol_type = other DNA
ggcccggttctgtatcgttttgtccagaaa

SEQ ID NO: 1050 - DNA, 30 bp, synthetic construct
  source 1..30: mol_type = other DNA
ggcccggttctgtgccgttttgtccagaaa

SEQ ID NO: 1051 - DNA, 30 bp, synthetic construct
  source 1..30: mol_type = other DNA
ggcccggttctgtggcgttttgtccagaaa

SEQ ID NO: 1052 - DNA, 30 bp, synthetic construct
  source 1..30: mol_type = other DNA
ggcccggttctgagcatttttgtccagaaa

SEQ ID NO: 1053 - DNA, 30 bp, synthetic construct
  source 1..30: mol_type = other DNA
ggcccggttctgagcatgtttgtccagaaa

SEQ ID NO: 1054 - DNA, 30 bp, synthetic construct
  source 1..30: mol_type = other DNA
ggcccggttctgagcacctttgtccagaaa

SEQ ID NO: 1055 - DNA, 30 bp, synthetic construct
  source 1..30: mol_type = other DNA
ggcccggttctgagcaactttgtccagaaa

SEQ ID NO: 1056 - DNA, 30 bp, synthetic construct
  source 1..30: mol_type = other DNA
ggcccggttctgagcaaatttgtccagaaa

SEQ ID NO: 1057 - DNA, 30 bp, synthetic construct
  source 1..30: mol_type = other DNA
ggcccggttctgagcagctttgtccagaaa

SEQ ID NO: 1058 - DNA, 30 bp, synthetic construct
  source 1..30: mol_type = other DNA
ggcccggttctgagcctgtttgtccagaaa

SEQ ID NO: 1059 - DNA, 30 bp, synthetic construct
  source 1..30: mol_type = other DNA
ggcccggttctgagcccgtttgtccagaaa

SEQ ID NO: 1060 - DNA, 30 bp, synthetic construct
  source 1..30: mol_type = other DNA
ggcccggttctgagccattttgtccagaaa

SEQ ID NO: 1061 - DNA, 30 bp, synthetic construct
  source 1..30: mol_type = other DNA
ggcccggttctgagccagtttgtccagaaa

SEQ ID NO: 1062 - DNA, 30 bp, synthetic construct
  source 1..30: mol_type = other DNA
ggcccggttctgagcgtgtttgtccagaaa

SEQ ID NO: 1063 - DNA, 30 bp, synthetic construct
  source 1..30: mol_type = other DNA
ggcccggttctgagcgcgtttgtccagaaa

SEQ ID NO: 1064 - DNA, 30 bp, synthetic construct
  source 1..30: mol_type = other DNA
ggcccggttctgagcgattttgtccagaaa

SEQ ID NO: 1065 - DNA, 30 bp, synthetic construct
  source 1..30: mol_type = other DNA
ggcccggttctgagcgaatttgtccagaaa

SEQ ID NO: 1066 - DNA, 30 bp, synthetic construct
  source 1..30: mol_type = other DNA
ggcccggttctgagcggctttgtccagaaa

SEQ ID NO: 1067 - DNA, 30 bp, synthetic construct
  source 1..30: mol_type = other DNA
ggcccggttctgagcttttttgtccagaaa

SEQ ID NO: 1068 - DNA, 30 bp, synthetic construct
  source 1..30: mol_type = other DNA
ggcccggttctgagctattttgtccagaaa

SEQ ID NO: 1069 - DNA, 30 bp, synthetic construct
  source 1..30: mol_type = other DNA
ggcccggttctgagctgctttgtccagaaa

SEQ ID NO: 1070 - DNA, 30 bp, synthetic construct
  source 1..30: mol_type = other DNA
ggcccggttctgagctggtttgtccagaaa

SEQ ID NO: 1071 - DNA, 30 bp, synthetic construct
  source 1..30: mol_type = other DNA
ggcccggttctgagccgtattgtccagaaa

SEQ ID NO: 1072 - DNA, 30 bp, synthetic construct
  source 1..30: mol_type = other DNA
ggcccggttctgagccgtatggtccagaaa

SEQ ID NO: 1073 - DNA, 30 bp, synthetic construct
  source 1..30: mol_type = other DNA
ggcccggttctgagccgtaccgtccagaaa

SEQ ID NO: 1074 - DNA, 30 bp, synthetic construct
  source 1..30: mol_type = other DNA
ggcccggttctgagccgtaacgtccagaaa

SEQ ID NO: 1075 - DNA, 30 bp, synthetic construct
  source 1..30: mol_type = other DNA
ggcccggttctgagccgtaaagtccagaaa

SEQ ID NO: 1076 - DNA, 30 bp, synthetic construct
  source 1..30: mol_type = other DNA
ggcccggttctgagccgtagcgtccagaaa

SEQ ID NO: 1077 - DNA, 30 bp, synthetic construct
  source 1..30: mol_type = other DNA
ggcccggttctgagccgtcgtgtccagaaa

SEQ ID NO: 1078 - DNA, 30 bp, synthetic construct
  source 1..30: mol_type = other DNA
ggcccggttctgagccgtctggtccagaaa

SEQ ID NO: 1079 - DNA, 30 bp, synthetic construct
  source 1..30: mol_type = other DNA
ggcccggttctgagccgtccggtccagaaa

SEQ ID NO: 1080 - DNA, 30 bp, synthetic construct
  source 1..30: mol_type = other DNA
ggcccggttctgagccgtcatgtccagaaa

SEQ ID NO: 1081 - DNA, 30 bp, synthetic construct
  source 1..30: mol_type = other DNA
ggcccggttctgagccgtcaggtccagaaa

SEQ ID NO: 1082 - DNA, 30 bp, synthetic construct
  source 1..30: mol_type = other DNA
ggcccggttctgagccgtgtggtccagaaa

SEQ ID NO: 1083 - DNA, 30 bp, synthetic construct
  source 1..30: mol_type = other DNA
ggcccggttctgagccgtgcggtccagaaa

SEQ ID NO: 1084 - DNA, 30 bp, synthetic construct
  source 1..30: mol_type = other DNA
ggcccggttctgagccgtgatgtccagaaa

SEQ ID NO: 1085 - DNA, 30 bp, synthetic construct
  source 1..30: mol_type = other DNA
ggcccggttctgagccgtgaagtccagaaa

SEQ ID NO: 1086 - DNA, 30 bp, synthetic construct
  source 1..30: mol_type = other DNA
ggcccggttctgagccgtggcgtccagaaa

SEQ ID NO: 1087 - DNA, 30 bp, synthetic construct
  source 1..30: mol_type = other DNA
ggcccggttctgagccgttatgtccagaaa

SEQ ID NO: 1088 - DNA, 30 bp, synthetic construct
  source 1..30: mol_type = other DNA
ggcccggttctgagccgttgcgtccagaaa

SEQ ID NO: 1089 - DNA, 30 bp, synthetic construct
  source 1..30: mol_type = other DNA
ggcccggttctgagccgttgggtccagaaa

SEQ ID NO: 1090 - DNA, 30 bp, synthetic construct
  source 1..30: mol_type = other DNA
ggcccggttctgagccgttttattcagaaa

SEQ ID NO: 1091 - DNA, 30 bp, synthetic construct
  source 1..30: mol_type = other DNA
ggcccggttctgagccgttttatgcagaaa

SEQ ID NO: 1092 - DNA, 30 bp, synthetic construct
  source 1..30: mol_type = other DNA
ggcccggttctgagccgttttacccagaaa

SEQ ID NO: 1093 - DNA, 30 bp, synthetic construct
  source 1..30: mol_type = other DNA
ggcccggttctgagccgttttaaccagaaa

SEQ ID NO: 1094 - DNA, 30 bp, synthetic construct
  source 1..30: mol_type = other DNA
ggcccggttctgagccgttttaaacagaaa

SEQ ID NO: 1095 - DNA, 30 bp, synthetic construct
  source 1..30: mol_type = other DNA
ggcccggttctgagccgttttagccagaaa

SEQ ID NO: 1096 - DNA, 30 bp, synthetic construct
  source 1..30: mol_type = other DNA
ggcccggttctgagccgttttcgtcagaaa

SEQ ID NO: 1097 - DNA, 30 bp, synthetic construct
  source 1..30: mol_type = other DNA
ggcccggttctgagccgttttctgcagaaa

SEQ ID NO: 1098 - DNA, 30 bp, synthetic construct
  source 1..30: mol_type = other DNA
ggcccggttctgagccgttttccgcagaaa

SEQ ID NO: 1099 - DNA, 30 bp, synthetic construct
  source 1..30: mol_type = other DNA
ggcccggttctgagccgttttcatcagaaa

SEQ ID NO: 1100 - DNA, 30 bp, synthetic construct
  source 1..30: mol_type = other DNA
ggcccggttctgagccgttttcagcagaaa

SEQ ID NO: 1101 - DNA, 30 bp, synthetic construct
  source 1..30: mol_type = other DNA
ggcccggttctgagccgttttgcgcagaaa

SEQ ID NO: 1102 - DNA, 30 bp, synthetic construct
  source 1..30: mol_type = other DNA
ggcccggttctgagccgttttgatcagaaa

SEQ ID NO: 1103 - DNA, 30 bp, synthetic construct
  source 1..30: mol_type = other DNA
ggcccggttctgagccgttttgaacagaaa

SEQ ID NO: 1104 - DNA, 30 bp, synthetic construct
  source 1..30: mol_type = other DNA
ggcccggttctgagccgttttggccagaaa

SEQ ID NO: 1105 - DNA, 30 bp, synthetic construct
  source 1..30: mol_type = other DNA
ggcccggttctgagccgtttttttcagaaa

SEQ ID NO: 1106 - DNA, 30 bp, synthetic construct
  source 1..30: mol_type = other DNA
ggcccggttctgagccgtttttatcagaaa

SEQ ID NO: 1107 - DNA, 30 bp, synthetic construct
  source 1..30: mol_type = other DNA
ggcccggttctgagccgtttttgccagaaa

SEQ ID NO: 1108 - DNA, 30 bp, synthetic construct
  source 1..30: mol_type = other DNA
ggcccggttctgagccgtttttggcagaaa

SEQ ID NO: 1109 - DNA, 30 bp, synthetic construct
  source 1..30: mol_type = other DNA
ggcccggttctgagccgttttgtcattaaa

SEQ ID NO: 1110 - DNA, 30 bp, synthetic construct
  source 1..30: mol_type = other DNA
ggcccggttctgagccgttttgtcatgaaa

SEQ ID NO: 1111 - DNA, 30 bp, synthetic construct
  source 1..30: mol_type = other DNA
ggcccggttctgagccgttttgtcaccaaa

SEQ ID NO: 1112 - DNA, 30 bp, synthetic construct
  source 1..30: mol_type = other DNA
ggcccggttctgagccgttttgtcaacaaa

SEQ ID NO: 1113 - DNA, 30 bp, synthetic construct
  source 1..30: mol_type = other DNA
ggcccggttctgagccgttttgtcaaaaaa

SEQ ID NO: 1114 - DNA, 30 bp, synthetic construct
  source 1..30: mol_type = other DNA
ggcccggttctgagccgttttgtcagcaaa

SEQ ID NO: 1115 - DNA, 30 bp, synthetic construct
  source 1..30: mol_type = other DNA
ggcccggttctgagccgttttgtccgtaaa

SEQ ID NO: 1116 - DNA, 30 bp, synthetic construct
  source 1..30: mol_type = other DNA
ggcccggttctgagccgttttgtcctgaaa

SEQ ID NO: 1117 - DNA, 30 bp, synthetic construct
  source 1..30: mol_type = other DNA
ggcccggttctgagccgttttgtcccgaaa

SEQ ID NO: 1118 - DNA, 30 bp, synthetic construct
  source 1..30: mol_type = other DNA
ggcccggttctgagccgttttgtccataaa

SEQ ID NO: 1119 - DNA, 30 bp, synthetic construct
  source 1..30: mol_type = other DNA
ggcccggttctgagccgttttgtcgtgaaa

SEQ ID NO: 1120 - DNA, 30 bp, synthetic construct
  source 1..30: mol_type = other DNA
ggcccggttctgagccgttttgtcgcgaaa

SEQ ID NO: 1121 - DNA, 30 bp, synthetic construct
  source 1..30: mol_type = other DNA
ggcccggttctgagccgttttgtcgataaa

SEQ ID NO: 1122 - DNA, 30 bp, synthetic construct
  source 1..30: mol_type = other DNA
ggcccggttctgagccgttttgtcgaaaaa

SEQ ID NO: 1123 - DNA, 30 bp, synthetic construct
  source 1..30: mol_type = other DNA
ggcccggttctgagccgttttgtcggcaaa

SEQ ID NO: 1124 - DNA, 30 bp, synthetic construct
  source 1..30: mol_type = other DNA
ggcccggttctgagccgttttgtctttaaa

SEQ ID NO: 1125 - DNA, 30 bp, synthetic construct
  source 1..30: mol_type = other DNA
ggcccggttctgagccgttttgtctataaa

SEQ ID NO: 1126 - DNA, 30 bp, synthetic construct
  source 1..30: mol_type = other DNA
ggcccggttctgagccgttttgtctgcaaa

SEQ ID NO: 1127 - DNA, 30 bp, synthetic construct
  source 1..30: mol_type = other DNA
ggcccggttctgagccgttttgtctggaaa

SEQ ID NO: 1128 - DNA, 30 bp, synthetic construct
  source 1..30: mol_type = other DNA
ggcccggttctgagccgttttgtccagatt

SEQ ID NO: 1129 - DNA, 30 bp, synthetic construct
  source 1..30: mol_type = other DNA
ggcccggttctgagccgttttgtccagatg

SEQ ID NO: 1130 - DNA, 30 bp, synthetic construct
  source 1..30: mol_type = other DNA
ggcccggttctgagccgttttgtccagacc

SEQ ID NO: 1131 - DNA, 30 bp, synthetic construct
  source 1..30: mol_type = other DNA
ggcccggttctgagccgttttgtccagaac

SEQ ID NO: 1132 - DNA, 30 bp, synthetic construct
  source 1..30: mol_type = other DNA
ggcccggttctgagccgttttgtccagagc

SEQ ID NO: 1133 - DNA, 30 bp, synthetic construct
  source 1..30: mol_type = other DNA
ggcccggttctgagccgttttgtccagcgt

SEQ ID NO: 1134 - DNA, 30 bp, synthetic construct
  source 1..30: mol_type = other DNA
ggcccggttctgagccgttttgtccagctg

SEQ ID NO: 1135 - DNA, 30 bp, synthetic construct
  source 1..30: mol_type = other DNA
ggcccggttctgagccgttttgtccagccg

SEQ ID NO: 1136 - DNA, 30 bp, synthetic construct
  source 1..30: mol_type = other DNA
ggcccggttctgagccgttttgtccagcat

SEQ ID NO: 1137 - DNA, 30 bp, synthetic construct
  source 1..30: mol_type = other DNA
ggcccggttctgagccgttttgtccagcag

SEQ ID NO: 1138 - DNA, 30 bp, synthetic construct
  source 1..30: mol_type = other DNA
ggcccggttctgagccgttttgtccaggtg

SEQ ID NO: 1139 - DNA, 30 bp, synthetic construct
  source 1..30: mol_type = other DNA
ggcccggttctgagccgttttgtccaggcg

SEQ ID NO: 1140 - DNA, 30 bp, synthetic construct
  source 1..30: mol_type = other DNA
ggcccggttctgagccgttttgtccaggat

SEQ ID NO: 1141 - DNA, 30 bp, synthetic construct
  source 1..30: mol_type = other DNA
ggcccggttctgagccgttttgtccaggaa

SEQ ID NO: 1142 - DNA, 30 bp, synthetic construct
  source 1..30: mol_type = other DNA
ggcccggttctgagccgttttgtccagggc

SEQ ID NO: 1143 - DNA, 30 bp, synthetic construct
  source 1..30: mol_type = other DNA
ggcccggttctgagccgttttgtccagttt

SEQ ID NO: 1144 - DNA, 30 bp, synthetic construct
  source 1..30: mol_type = other DNA
ggcccggttctgagccgttttgtccagtat

SEQ ID NO: 1145 - DNA, 30 bp, synthetic construct
  source 1..30: mol_type = other DNA
ggcccggttctgagccgttttgtccagtgc

SEQ ID NO: 1146 - DNA, 30 bp, synthetic construct
  source 1..30: mol_type = other DNA
ggcccggttctgagccgttttgtccagtgg

SEQ ID NO: 1147 - DNA, 30 bp, Bacillus subtilis
  source 1..30: mol_type = genomic DNA
gtgctggacgaaactggtgctaaaaaggtg

SEQ ID NO: 1148 - DNA, 30 bp, synthetic construct
  source 1..30: mol_type = other DNA
attctggacgaaactggtgctaaaaaggtg

SEQ ID NO: 1149 - DNA, 30 bp, synthetic construct
  source 1..30: mol_type = other DNA
atgctggacgaaactggtgctaaaaaggtg

SEQ ID NO: 1150 - DNA, 30 bp, synthetic construct
  source 1..30: mol_type = other DNA
accctggacgaaactggtgctaaaaaggtg

SEQ ID NO: 1151 - DNA, 30 bp, synthetic construct
  source 1..30: mol_type = other DNA
aacctggacgaaactggtgctaaaaaggtg

SEQ ID NO: 1152 - DNA, 30 bp, synthetic construct
  source 1..30: mol_type = other DNA
aaactggacgaaactggtgctaaaaaggtg

SEQ ID NO: 1153 - DNA, 30 bp, synthetic construct
  source 1..30: mol_type = other DNA
agcctggacgaaactggtgctaaaaaggtg

SEQ ID NO: 1154 - DNA, 30 bp, synthetic construct
  source 1..30: mol_type = other DNA
cgtctggacgaaactggtgctaaaaaggtg

SEQ ID NO: 1155 - DNA, 30 bp, synthetic construct
  source 1..30: mol_type = other DNA
ctgctggacgaaactggtgctaaaaaggtg

SEQ ID NO: 1156 - DNA, 30 bp, synthetic construct
  source 1..30: mol_type = other DNA
ccgctggacgaaactggtgctaaaaaggtg

SEQ ID NO: 1157 - DNA, 30 bp, synthetic construct
  source 1..30: mol_type = other DNA
catctggacgaaactggtgctaaaaaggtg

SEQ ID NO: 1158 - DNA, 30 bp, synthetic construct
  source 1..30: mol_type = other DNA
cagctggacgaaactggtgctaaaaaggtg

SEQ ID NO: 1159 - DNA, 30 bp, synthetic construct
  source 1..30: mol_type = other DNA
gcgctggacgaaactggtgctaaaaaggtg

SEQ ID NO: 1160 - DNA, 30 bp, synthetic construct
  source 1..30: mol_type = other DNA
gatctggacgaaactggtgctaaaaaggtg

SEQ ID NO: 1161 - DNA, 30 bp, synthetic construct
  source 1..30: mol_type = other DNA
gaactggacgaaactggtgctaaaaaggtg

SEQ ID NO: 1162 - DNA, 30 bp, synthetic construct
  source 1..30: mol_type = other DNA
ggcctggacgaaactggtgctaaaaaggtg

SEQ ID NO: 1163 - DNA, 30 bp, synthetic construct
  source 1..30: mol_type = other DNA
tttctggacgaaactggtgctaaaaaggtg

SEQ ID NO: 1164 - DNA, 30 bp, synthetic construct
  source 1..30: mol_type = other DNA
tatctggacgaaactggtgctaaaaaggtg

SEQ ID NO: 1165 - DNA, 30 bp, synthetic construct
  source 1..30: mol_type = other DNA
tgcctggacgaaactggtgctaaaaaggtg

SEQ ID NO: 1166 - DNA, 30 bp, synthetic construct
  source 1..30: mol_type = other DNA
tggctggacgaaactggtgctaaaaaggtg

SEQ ID NO: 1167 - DNA, 30 bp, synthetic construct
  source 1..30: mol_type = other DNA
gtgattgacgaaactggtgctaaaaaggtg

SEQ ID NO: 1168 - DNA, 30 bp, synthetic construct
  source 1..30: mol_type = other DNA
gtgatggacgaaactggtgctaaaaaggtg

SEQ ID NO: 1169 - DNA, 30 bp, synthetic construct
  source 1..30: mol_type = other DNA
gtgaccgacgaaactggtgctaaaaaggtg

SEQ ID NO: 1170 - DNA, 30 bp, synthetic construct
  source 1..30: mol_type = other DNA
gtgaacgacgaaactggtgctaaaaaggtg

SEQ ID NO: 1171 - DNA, 30 bp, synthetic construct
  source 1..30: mol_type = other DNA
gtgaaagacgaaactggtgctaaaaaggtg

SEQ ID NO: 1172 - DNA, 30 bp, synthetic construct
  source 1..30: mol_type = other DNA
gtgagcgacgaaactggtgctaaaaaggtg

SEQ ID NO: 1173 - DNA, 30 bp, synthetic construct
  source 1..30: mol_type = other DNA
gtgcgtgacgaaactggtgctaaaaaggtg

SEQ ID NO: 1174 - DNA, 30 bp, synthetic construct
  source 1..30: mol_type = other DNA
gtgccggacgaaactggtgctaaaaaggtg

SEQ ID NO: 1175 - DNA, 30 bp, synthetic construct
  source 1..30: mol_type = other DNA
gtgcatgacgaaactggtgctaaaaaggtg

SEQ ID NO: 1176 - DNA, 30 bp, synthetic construct
  source 1..30: mol_type = other DNA
gtgcaggacgaaactggtgctaaaaaggtg

SEQ ID NO: 1177 - DNA, 30 bp, synthetic construct
  source 1..30: mol_type = other DNA
gtggtggacgaaactggtgctaaaaaggtg

SEQ ID NO: 1178 - DNA, 30 bp, synthetic construct
  source 1..30: mol_type = other DNA
gtggcggacgaaactggtgctaaaaaggtg

SEQ ID NO: 1179 - DNA, 30 bp, synthetic construct
  source 1..30: mol_type = other DNA
gtggatgacgaaactggtgctaaaaaggtg

SEQ ID NO: 1180 - DNA, 30 bp, synthetic construct
  source 1..30: mol_type = other DNA
gtggaagacgaaactggtgctaaaaaggtg

SEQ ID NO: 1181 - DNA, 30 bp, synthetic construct
  source 1..30: mol_type = other DNA
gtgggcgacgaaactggtgctaaaaaggtg

SEQ ID NO: 1182 - DNA, 30 bp, synthetic construct
  source 1..30: mol_type = other DNA
gtgtttgacgaaactggtgctaaaaaggtg

SEQ ID NO: 1183 - DNA, 30 bp, synthetic construct
  source 1..30: mol_type = other DNA
gtgtatgacgaaactggtgctaaaaaggtg

SEQ ID NO: 1184 - DNA, 30 bp, synthetic construct
  source 1..30: mol_type = other DNA
gtgtgcgacgaaactggtgctaaaaaggtg

SEQ ID NO: 1185 - DNA, 30 bp, synthetic construct
  source 1..30: mol_type = other DNA
gtgtgggacgaaactggtgctaaaaaggtg

SEQ ID NO: 1186 - DNA, 30 bp, synthetic construct
  source 1..30: mol_type = other DNA
gtgctgattgaaactggtgctaaaaaggtg

SEQ ID NO: 1187 - DNA, 30 bp, synthetic construct
  source 1..30: mol_type = other DNA
gtgctgatggaaactggtgctaaaaaggtg

SEQ ID NO: 1188 - DNA, 30 bp, synthetic construct
  source 1..30: mol_type = other DNA
gtgctgaccgaaactggtgctaaaaaggtg

SEQ ID NO: 1189 - DNA, 30 bp, synthetic construct
  source 1..30: mol_type = other DNA
gtgctgaacgaaactggtgctaaaaaggtg

SEQ ID NO: 1190 - DNA, 30 bp, synthetic construct
  source 1..30: mol_type = other DNA
gtgctgaaagaaactggtgctaaaaaggtg

SEQ ID NO: 1191 - DNA, 30 bp, synthetic construct
  source 1..30: mol_type = other DNA
gtgctgagcgaaactggtgctaaaaaggtg

SEQ ID NO: 1192 - DNA, 30 bp, synthetic construct
  source 1..30: mol_type = other DNA
gtgctgcgtgaaactggtgctaaaaaggtg

SEQ ID NO: 1193 - DNA, 30 bp, synthetic construct
  source 1..30: mol_type = other DNA
gtgctgctggaaactggtgctaaaaaggtg

SEQ ID NO: 1194 - DNA, 30 bp, synthetic construct
  source 1..30: mol_type = other DNA
gtgctgccggaaactggtgctaaaaaggtg

SEQ ID NO: 1195 - DNA, 30 bp, synthetic construct
  source 1..30: mol_type = other DNA
gtgctgcatgaaactggtgctaaaaaggtg

SEQ ID NO: 1196 - DNA, 30 bp, synthetic construct
  source 1..30: mol_type = other DNA
gtgctgcaggaaactggtgctaaaaaggtg

SEQ ID NO: 1197 - DNA, 30 bp, synthetic construct
  source 1..30: mol_type = other DNA
gtgctggtggaaactggtgctaaaaaggtg

SEQ ID NO: 1198 - DNA, 30 bp, synthetic construct
  source 1..30: mol_type = other DNA
gtgctggcggaaactggtgctaaaaaggtg

SEQ ID NO: 1199 - DNA, 30 bp, synthetic construct
  source 1..30: mol_type = other DNA
gtgctggaagaaactggtgctaaaaaggtg

SEQ ID NO: 1200 - DNA, 30 bp, synthetic construct
  source 1..30: mol_type = other DNA
gtgctgggcgaaactggtgctaaaaaggtg

SEQ ID NO: 1201 - DNA, 30 bp, synthetic construct
  source 1..30: mol_type = other DNA
gtgctgtttgaaactggtgctaaaaaggtg

SEQ ID NO: 1202 - DNA, 30 bp, synthetic construct
  source 1..30: mol_type = other DNA
gtgctgtatgaaactggtgctaaaaaggtg

SEQ ID NO: 1203 - DNA, 30 bp, synthetic construct
  source 1..30: mol_type = other DNA
gtgctgtgcgaaactggtgctaaaaaggtg

SEQ ID NO: 1204 - DNA, 30 bp, synthetic construct
  source 1..30: mol_type = other DNA
gtgctgtgggaaactggtgctaaaaaggtg

SEQ ID NO: 1205 - DNA, 30 bp, synthetic construct
  source 1..30: mol_type = other DNA
gtgctggacattactggtgctaaaaaggtg

SEQ ID NO: 1206 - DNA, 30 bp, synthetic construct
  source 1..30: mol_type = other DNA
gtgctggacatgactggtgctaaaaaggtg

SEQ ID NO: 1207 - DNA, 30 bp, synthetic construct
  source 1..30: mol_type = other DNA
gtgctggacaccactggtgctaaaaaggtg

SEQ ID NO: 1208 - DNA, 30 bp, synthetic construct
  source 1..30: mol_type = other DNA
gtgctggacaacactggtgctaaaaaggtg

SEQ ID NO: 1209 - DNA, 30 bp, synthetic construct
  source 1..30: mol_type = other DNA
gtgctggacaaaactggtgctaaaaaggtg

SEQ ID NO: 1210 - DNA, 30 bp, synthetic construct
  source 1..30: mol_type = other DNA
gtgctggacagcactggtgctaaaaaggtg

SEQ ID NO: 1211 - DNA, 30 bp, synthetic construct
  source 1..30: mol_type = other DNA
gtgctggaccgtactggtgctaaaaaggtg

SEQ ID NO: 1212 - DNA, 30 bp, synthetic construct
  source 1..30: mol_type = other DNA
gtgctggacctgactggtgctaaaaaggtg

SEQ ID NO: 1213 - DNA, 30 bp, synthetic construct
  source 1..30: mol_type = other DNA
gtgctggacccgactggtgctaaaaaggtg

SEQ ID NO: 1214 - DNA, 30 bp, synthetic construct
  source 1..30: mol_type = other DNA
gtgctggaccatactggtgctaaaaaggtg

SEQ ID NO: 1215 - DNA, 30 bp, synthetic construct
  source 1..30: mol_type = other DNA
gtgctggaccagactggtgctaaaaaggtg

SEQ ID NO: 1216 - DNA, 30 bp, synthetic construct
  source 1..30: mol_type = other DNA
gtgctggacgtgactggtgctaaaaaggtg

SEQ ID NO: 1217 - DNA, 30 bp, synthetic construct
  source 1..30: mol_type = other DNA
gtgctggacgcgactggtgctaaaaaggtg

SEQ ID NO: 1218 - DNA, 30 bp, synthetic construct
  source 1..30: mol_type = other DNA
gtgctggacgatactggtgctaaaaaggtg

SEQ ID NO: 1219 - DNA, 30 bp, synthetic construct
  source 1..30: mol_type = other DNA
gtgctggacggcactggtgctaaaaaggtg

SEQ ID NO: 1220 - DNA, 30 bp, synthetic construct
  source 1..30: mol_type = other DNA
gtgctggactttactggtgctaaaaaggtg

SEQ ID NO: 1221 - DNA, 30 bp, synthetic construct
  source 1..30: mol_type = other DNA
gtgctggactatactggtgctaaaaaggtg

SEQ ID NO: 1222 - DNA, 30 bp, synthetic construct
  source 1..30: mol_type = other DNA
gtgctggactgcactggtgctaaaaaggtg

SEQ ID NO: 1223 - DNA, 30 bp, synthetic construct
  source 1..30: mol_type = other DNA
gtgctggactggactggtgctaaaaaggtg

SEQ ID NO: 1224 - DNA, 30 bp, synthetic construct
  source 1..30: mol_type = other DNA
gtgctggacgaaattggtgctaaaaaggtg

SEQ ID NO: 1225 - DNA, 30 bp, synthetic construct
  source 1..30: mol_type = other DNA
gtgctggacgaaatgggtgctaaaaaggtg

SEQ ID NO: 1226 - DNA, 30 bp, synthetic construct
  source 1..30: mol_type = other DNA
gtgctggacgaaaacggtgctaaaaaggtg

SEQ ID NO: 1227 - DNA, 30 bp, synthetic construct
  source 1..30: mol_type = other DNA
gtgctggacgaaaaaggtgctaaaaaggtg

SEQ ID NO: 1228 - DNA, 30 bp, synthetic construct
  source 1..30: mol_type = other DNA
gtgctggacgaaagcggtgctaaaaaggtg

SEQ ID NO: 1229 - DNA, 30 bp, synthetic construct
  source 1..30: mol_type = other DNA
gtgctggacgaacgtggtgctaaaaaggtg

SEQ ID NO: 1230 - DNA, 30 bp, synthetic construct
  source 1..30: mol_type = other DNA
gtgctggacgaactgggtgctaaaaaggtg

SEQ ID NO: 1231 - DNA, 30 bp, synthetic construct
  source 1..30: mol_type = other DNA
gtgctggacgaaccgggtgctaaaaaggtg

SEQ ID NO: 1232 - DNA, 30 bp, synthetic construct
  source 1..30: mol_type = other DNA
gtgctggacgaacatggtgctaaaaaggtg

SEQ ID NO: 1233 - DNA, 30 bp, synthetic construct
  source 1..30: mol_type = other DNA
gtgctggacgaacagggtgctaaaaaggtg

SEQ ID NO: 1234 - DNA, 30 bp, synthetic construct
  source 1..30: mol_type = other DNA
gtgctggacgaagtgggtgctaaaaaggtg

SEQ ID NO: 1235 - DNA, 30 bp, synthetic construct
  source 1..30: mol_type = other DNA
gtgctggacgaagcgggtgctaaaaaggtg

SEQ ID NO: 1236 - DNA, 30 bp, synthetic construct
  source 1..30: mol_type = other DNA
gtgctggacgaagatggtgctaaaaaggtg

SEQ ID NO: 1237 - DNA, 30 bp, synthetic construct
  source 1..30: mol_type = other DNA
gtgctggacgaagaaggtgctaaaaaggtg

SEQ ID NO: 1238 - DNA, 30 bp, synthetic construct
  source 1..30: mol_type = other DNA
gtgctggacgaaggcggtgctaaaaaggtg

SEQ ID NO: 1239 - DNA, 30 bp, synthetic construct
  source 1..30: mol_type = other DNA
gtgctggacgaatttggtgctaaaaaggtg

SEQ ID NO: 1240 - DNA, 30 bp, synthetic construct
  source 1..30: mol_type = other DNA
gtgctggacgaatatggtgctaaaaaggtg

SEQ ID NO: 1241 - DNA, 30 bp, synthetic construct
  source 1..30: mol_type = other DNA
gtgctggacgaatgcggtgctaaaaaggtg

SEQ ID NO: 1242 - DNA, 30 bp, synthetic construct
  source 1..30: mol_type = other DNA
gtgctggacgaatggggtgctaaaaaggtg

SEQ ID NO: 1243 - DNA, 30 bp, synthetic construct
  source 1..30: mol_type = other DNA
gtgctggacgaaactattgctaaaaaggtg

SEQ ID NO: 1244 - DNA, 30 bp, synthetic construct
  source 1..30: mol_type = other DNA
gtgctggacgaaactatggctaaaaaggtg

SEQ ID NO: 1245 - DNA, 30 bp, synthetic construct
  source 1..30: mol_type = other DNA
gtgctggacgaaactaccgctaaaaaggtg

SEQ ID NO: 1246 - DNA, 30 bp, synthetic construct
  source 1..30: mol_type = other DNA
gtgctggacgaaactaacgctaaaaaggtg

SEQ ID NO: 1247 - DNA, 30 bp, synthetic construct
  source 1..30: mol_type = other DNA
gtgctggacgaaactaaagctaaaaaggtg

SEQ ID NO: 1248 - DNA, 30 bp, synthetic construct
  source 1..30: mol_type = other DNA
gtgctggacgaaactagcgctaaaaaggtg

SEQ ID NO: 1249 - DNA, 30 bp, synthetic construct
  source 1..30: mol_type = other DNA
gtgctggacgaaactcgtgctaaaaaggtg

SEQ ID NO: 1250 - DNA, 30 bp, synthetic construct
  source 1..30: mol_type = other DNA
gtgctggacgaaactctggctaaaaaggtg

SEQ ID NO: 1251 - DNA, 30 bp, synthetic construct
  source 1..30: mol_type = other DNA
gtgctggacgaaactccggctaaaaaggtg

SEQ ID NO: 1252 - DNA, 30 bp, synthetic construct
  source 1..30: mol_type = other DNA
gtgctggacgaaactcatgctaaaaaggtg

SEQ ID NO: 1253 - DNA, 30 bp, synthetic construct
  source 1..30: mol_type = other DNA
gtgctggacgaaactcaggctaaaaaggtg

SEQ ID NO: 1254 - DNA, 30 bp, synthetic construct
  source 1..30: mol_type = other DNA
gtgctggacgaaactgtggctaaaaaggtg

SEQ ID NO: 1255 - DNA, 30 bp, synthetic construct
  source 1..30: mol_type = other DNA
gtgctggacgaaactgcggctaaaaaggtg

SEQ ID NO: 1256 - DNA, 30 bp, synthetic construct
  source 1..30: mol_type = other DNA
gtgctggacgaaactgatgctaaaaaggtg

SEQ ID NO: 1257 - DNA, 30 bp, synthetic construct
  source 1..30: mol_type = other DNA
gtgctggacgaaactgaagctaaaaaggtg

SEQ ID NO: 1258 - DNA, 30 bp, synthetic construct
  source 1..30: mol_type = other DNA
gtgctggacgaaacttttgctaaaaaggtg

SEQ ID NO: 1259 - DNA, 30 bp, synthetic construct
  source 1..30: mol_type = other DNA
gtgctggacgaaacttatgctaaaaaggtg

SEQ ID NO: 1260 - DNA, 30 bp, synthetic construct
  source 1..30: mol_type = other DNA
gtgctggacgaaacttgcgctaaaaaggtg

SEQ ID NO: 1261 - DNA, 30 bp, synthetic construct
  source 1..30: mol_type = other DNA
gtgctggacgaaacttgggctaaaaaggtg

SEQ ID NO: 1262 - DNA, 30 bp, synthetic construct
  source 1..30: mol_type = other DNA
gtgctggacgaaactggtattaaaaaggtg

SEQ ID NO: 1263 - DNA, 30 bp, synthetic construct
  source 1..30: mol_type = other DNA
gtgctggacgaaactggtatgaaaaaggtg

SEQ ID NO: 1264 - DNA, 30 bp, synthetic construct
  source 1..30: mol_type = other DNA
gtgctggacgaaactggtaccaaaaaggtg

SEQ ID NO: 1265 - DNA, 30 bp, synthetic construct
  source 1..30: mol_type = other DNA
gtgctggacgaaactggtaacaaaaaggtg

SEQ ID NO: 1266 - DNA, 30 bp, synthetic construct
  source 1..30: mol_type = other DNA
gtgctggacgaaactggtaaaaaaaaggtg

SEQ ID NO: 1267 - DNA, 30 bp, synthetic construct
  source 1..30: mol_type = other DNA
gtgctggacgaaactggtagcaaaaaggtg

SEQ ID NO: 1268 - DNA, 30 bp, synthetic construct
  source 1..30: mol_type = other DNA
gtgctggacgaaactggtcgtaaaaaggtg

SEQ ID NO: 1269 - DNA, 30 bp, synthetic construct
  source 1..30: mol_type = other DNA
gtgctggacgaaactggtctgaaaaaggtg

SEQ ID NO: 1270 - DNA, 30 bp, synthetic construct
  source 1..30: mol_type = other DNA
gtgctggacgaaactggtccgaaaaaggtg

SEQ ID NO: 1271 - DNA, 30 bp, synthetic construct
  source 1..30: mol_type = other DNA
gtgctggacgaaactggtcataaaaaggtg

SEQ ID NO: 1272 - DNA, 30 bp, synthetic construct
  source 1..30: mol_type = other DNA
gtgctggacgaaactggtcagaaaaaggtg

SEQ ID NO: 1273 - DNA, 30 bp, synthetic construct
  source 1..30: mol_type = other DNA
gtgctggacgaaactggtgtgaaaaaggtg

SEQ ID NO: 1274 - DNA, 30 bp, synthetic construct
  source 1..30: mol_type = other DNA
gtgctggacgaaactggtgataaaaaggtg

SEQ ID NO: 1275 - DNA, 30 bp, synthetic construct
  source 1..30: mol_type = other DNA
gtgctggacgaaactggtgaaaaaaaggtg

SEQ ID NO: 1276 - DNA, 30 bp, synthetic construct
  source 1..30: mol_type = other DNA
gtgctggacgaaactggtggcaaaaaggtg

SEQ ID NO: 1277 - DNA, 30 bp, synthetic construct
  source 1..30: mol_type = other DNA
gtgctggacgaaactggttttaaaaaggtg

SEQ ID NO: 1278 - DNA, 30 bp, synthetic construct
  source 1..30: mol_type = other DNA
gtgctggacgaaactggttataaaaaggtg

SEQ ID NO: 1279 - DNA, 30 bp, synthetic construct
  source 1..30: mol_type = other DNA
gtgctggacgaaactggttgcaaaaaggtg

SEQ ID NO: 1280 - DNA, 30 bp, synthetic construct
  source 1..30: mol_type = other DNA
gtgctggacgaaactggttggaaaaaggtg

SEQ ID NO: 1281 - DNA, 30 bp, synthetic construct
  source 1..30: mol_type = other DNA
gtgctggacgaaactggtgctattaaggtg

SEQ ID NO: 1282 - DNA, 30 bp, synthetic construct
  source 1..30: mol_type = other DNA
gtgctggacgaaactggtgctatgaaggtg

SEQ ID NO: 1283 - DNA, 30 bp, synthetic construct
  source 1..30: mol_type = other DNA
gtgctggacgaaactggtgctaccaaggtg

SEQ ID NO: 1284 - DNA, 30 bp, synthetic construct
  source 1..30: mol_type = other DNA
gtgctggacgaaactggtgctaacaaggtg

SEQ ID NO: 1285 - DNA, 30 bp, synthetic construct
  source 1..30: mol_type = other DNA
gtgctggacgaaactggtgctagcaaggtg

SEQ ID NO: 1286 - DNA, 30 bp, synthetic construct
  source 1..30: mol_type = other DNA
gtgctggacgaaactggtgctcgtaaggtg

SEQ ID NO: 1287 - DNA, 30 bp, synthetic construct
  source 1..30: mol_type = other DNA
gtgctggacgaaactggtgctctgaaggtg

SEQ ID NO: 1288 - DNA, 30 bp, synthetic construct
  source 1..30: mol_type = other DNA
gtgctggacgaaactggtgctccgaaggtg

SEQ ID NO: 1289 - DNA, 30 bp, synthetic construct
  source 1..30: mol_type = other DNA
gtgctggacgaaactggtgctcataaggtg

SEQ ID NO: 1290 - DNA, 30 bp, synthetic construct
  source 1..30: mol_type = other DNA
gtgctggacgaaactggtgctcagaaggtg

SEQ ID NO: 1291 - DNA, 30 bp, synthetic construct
  source 1..30: mol_type = other DNA
gtgctggacgaaactggtgctgtgaaggtg

SEQ ID NO: 1292 - DNA, 30 bp, synthetic construct
  source 1..30: mol_type = other DNA
gtgctggacgaaactggtgctgcgaaggtg

SEQ ID NO: 1293 - DNA, 30 bp, synthetic construct
  source 1..30: mol_type = other DNA
gtgctggacgaaactggtgctgataaggtg

SEQ ID NO: 1294 - DNA, 30 bp, synthetic construct
  source 1..30: mol_type = other DNA
gtgctggacgaaactggtgctgaaaaggtg

SEQ ID NO: 1295 - DNA, 30 bp, synthetic construct
  source 1..30: mol_type = other DNA
gtgctggacgaaactggtgctggcaaggtg

SEQ ID NO: 1296 - DNA, 30 bp, synthetic construct
  source 1..30: mol_type = other DNA
gtgctggacgaaactggtgcttttaaggtg

SEQ ID NO: 1297 - DNA, 30 bp, synthetic construct
  source 1..30: mol_type = other DNA
gtgctggacgaaactggtgcttataaggtg

SEQ ID NO: 1298 - DNA, 30 bp, synthetic construct
  source 1..30: mol_type = other DNA
gtgctggacgaaactggtgcttgcaaggtg

SEQ ID NO: 1299 - DNA, 30 bp, synthetic construct
  source 1..30: mol_type = other DNA
gtgctggacgaaactggtgcttggaaggtg

SEQ ID NO: 1300 - DNA, 30 bp, synthetic construct
  source 1..30: mol_type = other DNA
gtgctggacgaaactggtgctaaaattgtg

SEQ ID NO: 1301 - DNA, 30 bp, synthetic construct
  source 1..30: mol_type = other DNA
gtgctggacgaaactggtgctaaaatggtg

SEQ ID NO: 1302 - DNA, 30 bp, synthetic construct
  source 1..30: mol_type = other DNA
gtgctggacgaaactggtgctaaaaccgtg

SEQ ID NO: 1303 - DNA, 30 bp, synthetic construct
  source 1..30: mol_type = other DNA
gtgctggacgaaactggtgctaaaaacgtg

SEQ ID NO: 1304 - DNA, 30 bp, synthetic construct
  source 1..30: mol_type = other DNA
gtgctggacgaaactggtgctaaaagcgtg

SEQ ID NO: 1305 - DNA, 30 bp, synthetic construct
  source 1..30: mol_type = other DNA
gtgctggacgaaactggtgctaaacgtgtg

SEQ ID NO: 1306 - DNA, 30 bp, synthetic construct
  source 1..30: mol_type = other DNA
gtgctggacgaaactggtgctaaactggtg

SEQ ID NO: 1307 - DNA, 30 bp, synthetic construct
  source 1..30: mol_type = other DNA
gtgctggacgaaactggtgctaaaccggtg

SEQ ID NO: 1308 - DNA, 30 bp, synthetic construct
  source 1..30: mol_type = other DNA
gtgctggacgaaactggtgctaaacatgtg

SEQ ID NO: 1309 - DNA, 30 bp, synthetic construct
  source 1..30: mol_type = other DNA
gtgctggacgaaactggtgctaaacaggtg

SEQ ID NO: 1310 - DNA, 30 bp, synthetic construct
  source 1..30: mol_type = other DNA
gtgctggacgaaactggtgctaaagtggtg

SEQ ID NO: 1311 - DNA, 30 bp, synthetic construct
  source 1..30: mol_type = other DNA
gtgctggacgaaactggtgctaaagcggtg

SEQ ID NO: 1312 - DNA, 30 bp, synthetic construct
  source 1..30: mol_type = other DNA
gtgctggacgaaactggtgctaaagatgtg

SEQ ID NO: 1313 - DNA, 30 bp, synthetic construct
  source 1..30: mol_type = other DNA
gtgctggacgaaactggtgctaaagaagtg

SEQ ID NO: 1314 - DNA, 30 bp, synthetic construct
  source 1..30: mol_type = other DNA
gtgctggacgaaactggtgctaaaggcgtg

SEQ ID NO: 1315 - DNA, 30 bp, synthetic construct
  source 1..30: mol_type = other DNA
gtgctggacgaaactggtgctaaatttgtg

SEQ ID NO: 1316 - DNA, 30 bp, synthetic construct
  source 1..30: mol_type = other DNA
gtgctggacgaaactggtgctaaatatgtg

SEQ ID NO: 1317 - DNA, 30 bp, synthetic construct
  source 1..30: mol_type = other DNA
gtgctggacgaaactggtgctaaatgcgtg

SEQ ID NO: 1318 - DNA, 30 bp, synthetic construct
  source 1..30: mol_type = other DNA
gtgctggacgaaactggtgctaaatgggtg

SEQ ID NO: 1319 - DNA, 30 bp, synthetic construct
  source 1..30: mol_type = other DNA
gtgctggacgaaactggtgctaaaaagatt

SEQ ID NO: 1320 - DNA, 30 bp, synthetic construct
  source 1..30: mol_type = other DNA
gtgctggacgaaactggtgctaaaaagatg

SEQ ID NO: 1321 - DNA, 30 bp, synthetic construct
  source 1..30: mol_type = other DNA
gtgctggacgaaactggtgctaaaaagacc

SEQ ID NO: 1322 - DNA, 30 bp, synthetic construct
  source 1..30: mol_type = other DNA
gtgctggacgaaactggtgctaaaaagaac

SEQ ID NO: 1323 - DNA, 30 bp, synthetic construct
  source 1..30: mol_type = other DNA
gtgctggacgaaactggtgctaaaaagaaa

SEQ ID NO: 1324 - DNA, 30 bp, synthetic construct
  source 1..30: mol_type = other DNA
gtgctggacgaaactggtgctaaaaagagc

SEQ ID NO: 1325 - DNA, 30 bp, synthetic construct
  source 1..30: mol_type = other DNA
gtgctggacgaaactggtgctaaaaagcgt

SEQ ID NO: 1326 - DNA, 30 bp, synthetic construct
  source 1..30: mol_type = other DNA
gtgctggacgaaactggtgctaaaaagctg

SEQ ID NO: 1327 - DNA, 30 bp, synthetic construct
  source 1..30: mol_type = other DNA
gtgctggacgaaactggtgctaaaaagccg

SEQ ID NO: 1328 - DNA, 30 bp, synthetic construct
  source 1..30: mol_type = other DNA
gtgctggacgaaactggtgctaaaaagcat

SEQ ID NO: 1329 - DNA, 30 bp, synthetic construct
  source 1..30: mol_type = other DNA
gtgctggacgaaactggtgctaaaaagcag

SEQ ID NO: 1330 - DNA, 30 bp, synthetic construct
  source 1..30: mol_type = other DNA
gtgctggacgaaactggtgctaaaaaggcg

SEQ ID NO: 1331 - DNA, 30 bp, synthetic construct
  source 1..30: mol_type = other DNA
gtgctggacgaaactggtgctaaaaaggat

SEQ ID NO: 1332 - DNA, 30 bp, synthetic construct
  source 1..30: mol_type = other DNA
gtgctggacgaaactggtgctaaaaaggaa

SEQ ID NO: 1333 - DNA, 30 bp, synthetic construct
  source 1..30: mol_type = other DNA
gtgctggacgaaactggtgctaaaaagggc

SEQ ID NO: 1334 - DNA, 30 bp, synthetic construct
  source 1..30: mol_type = other DNA
gtgctggacgaaactggtgctaaaaagttt

SEQ ID NO: 1335 - DNA, 30 bp, synthetic construct
  source 1..30: mol_type = other DNA
gtgctggacgaaactggtgctaaaaagtat

SEQ ID NO: 1336 - DNA, 30 bp, synthetic construct
  source 1..30: mol_type = other DNA
gtgctggacgaaactggtgctaaaaagtgc

SEQ ID NO: 1337 - DNA, 30 bp, synthetic construct
  source 1..30: mol_type = other DNA
gtgctggacgaaactggtgctaaaaagtgg

SEQ ID NO: 1338 - DNA, 30 bp, Bacillus subtilis
  source 1..30: mol_type = genomic DNA
gacatcgttgctcacagcatgggtggcgcg

SEQ ID NO: 1339 - DNA, 30 bp, synthetic construct
  source 1..30: mol_type = other DNA
attatcgttgctcacagcatgggtggcgcg

SEQ ID NO: 1340 - DNA, 30 bp, synthetic construct
  source 1..30: mol_type = other DNA
atgatcgttgctcacagcatgggtggcgcg

SEQ ID NO: 1341 - DNA, 30 bp, synthetic construct
  source 1..30: mol_type = other DNA
accatcgttgctcacagcatgggtggcgcg

SEQ ID NO: 1342 - DNA, 30 bp, synthetic construct
  source 1..30: mol_type = other DNA
aacatcgttgctcacagcatgggtggcgcg

SEQ ID NO: 1343 - DNA, 30 bp, synthetic construct
  source 1..30: mol_type = other DNA
aaaatcgttgctcacagcatgggtggcgcg

SEQ ID NO: 1344 - DNA, 30 bp, synthetic construct
  source 1..30: mol_type = other DNA
agcatcgttgctcacagcatgggtggcgcg

SEQ ID NO: 1345 - DNA, 30 bp, synthetic construct
  source 1..30: mol_type = other DNA
cgtatcgttgctcacagcatgggtggcgcg

SEQ ID NO: 1346 - DNA, 30 bp, synthetic construct
  source 1..30: mol_type = other DNA
ctgatcgttgctcacagcatgggtggcgcg

SEQ ID NO: 1347 - DNA, 30 bp, synthetic construct
  source 1..30: mol_type = other DNA
ccgatcgttgctcacagcatgggtggcgcg

SEQ ID NO: 1348 - DNA, 30 bp, synthetic construct
  source 1..30: mol_type = other DNA
catatcgttgctcacagcatgggtggcgcg

SEQ ID NO: 1349 - DNA, 30 bp, synthetic construct
  source 1..30: mol_type = other DNA
cagatcgttgctcacagcatgggtggcgcg

SEQ ID NO: 1350 - DNA, 30 bp, synthetic construct
  source 1..30: mol_type = other DNA
gtgatcgttgctcacagcatgggtggcgcg

SEQ ID NO: 1351 - DNA, 30 bp, synthetic construct
  source 1..30: mol_type = other DNA
gcgatcgttgctcacagcatgggtggcgcg

SEQ ID NO: 1352 - DNA, 30 bp, synthetic construct
  source 1..30: mol_type = other DNA
gaaatcgttgctcacagcatgggtggcgcg

SEQ ID NO: 1353 - DNA, 30 bp, synthetic construct
  source 1..30: mol_type = other DNA
ggcatcgttgctcacagcatgggtggcgcg

SEQ ID NO: 1354 - DNA, 30 bp, synthetic construct
  source 1..30: mol_type = other DNA
tttatcgttgctcacagcatgggtggcgcg

SEQ ID NO: 1355 - DNA, 30 bp, synthetic construct
  source 1..30: mol_type = other DNA
tatatcgttgctcacagcatgggtggcgcg

SEQ ID NO: 1356 - DNA, 30 bp, synthetic construct
  source 1..30: mol_type = other DNA
tgcatcgttgctcacagcatgggtggcgcg

SEQ ID NO: 1357 - DNA, 30 bp, synthetic construct
  source 1..30: mol_type = other DNA
tggatcgttgctcacagcatgggtggcgcg

SEQ ID NO: 1358 - DNA, 30 bp, synthetic construct
  source 1..30: mol_type = other DNA
gacatggttgctcacagcatgggtggcgcg

SEQ ID NO: 1359 - DNA, 30 bp, synthetic construct
  source 1..30: mol_type = other DNA
gacaccgttgctcacagcatgggtggcgcg

SEQ ID NO: 1360 - DNA, 30 bp, synthetic construct
  source 1..30: mol_type = other DNA
gacaacgttgctcacagcatgggtggcgcg

SEQ ID NO: 1361 - DNA, 30 bp, synthetic construct
  source 1..30: mol_type = other DNA
gacaaagttgctcacagcatgggtggcgcg

SEQ ID NO: 1362 - DNA, 30 bp, synthetic construct
  source 1..30: mol_type = other DNA
gacagcgttgctcacagcatgggtggcgcg

SEQ ID NO: 1363 - DNA, 30 bp, synthetic construct
  source 1..30: mol_type = other DNA
gaccgtgttgctcacagcatgggtggcgcg

SEQ ID NO: 1364 - DNA, 30 bp, synthetic construct
  source 1..30: mol_type = other DNA
gacctggttgctcacagcatgggtggcgcg

SEQ ID NO: 1365 - DNA, 30 bp, synthetic construct
  source 1..30: mol_type = other DNA
gacccggttgctcacagcatgggtggcgcg

SEQ ID NO: 1366 - DNA, 30 bp, synthetic construct
  source 1..30: mol_type = other DNA
gaccatgttgctcacagcatgggtggcgcg

SEQ ID NO: 1367 - DNA, 30 bp, synthetic construct
  source 1..30: mol_type = other DNA
gaccaggttgctcacagcatgggtggcgcg

SEQ ID NO: 1368 - DNA, 30 bp, synthetic construct
  source 1..30: mol_type = other DNA
gacgtggttgctcacagcatgggtggcgcg

SEQ ID NO: 1369 - DNA, 30 bp, synthetic construct
  source 1..30: mol_type = other DNA
gacgcggttgctcacagcatgggtggcgcg

SEQ ID NO: 1370 - DNA, 30 bp, synthetic construct
  source 1..30: mol_type = other DNA
gacgatgttgctcacagcatgggtggcgcg

SEQ ID NO: 1371 - DNA, 30 bp, synthetic construct
  source 1..30: mol_type = other DNA
gacgaagttgctcacagcatgggtggcgcg

SEQ ID NO: 1372 - DNA, 30 bp, synthetic construct
  source 1..30: mol_type = other DNA
gacggcgttgctcacagcatgggtggcgcg

SEQ ID NO: 1373 - DNA, 30 bp, synthetic construct
  source 1..30: mol_type = other DNA
gactttgttgctcacagcatgggtggcgcg

SEQ ID NO: 1374 - DNA, 30 bp, synthetic construct
  source 1..30: mol_type = other DNA
gactatgttgctcacagcatgggtggcgcg

SEQ ID NO: 1375 - DNA, 30 bp, synthetic construct
  source 1..30: mol_type = other DNA
gactgcgttgctcacagcatgggtggcgcg

SEQ ID NO: 1376 - DNA, 30 bp, synthetic construct
  source 1..30: mol_type = other DNA
gactgggttgctcacagcatgggtggcgcg

SEQ ID NO: 1377 - DNA, 30 bp, synthetic construct
  source 1..30: mol_type = other DNA
gacatcattgctcacagcatgggtggcgcg

SEQ ID NO: 1378 - DNA, 30 bp, synthetic construct
  source 1..30: mol_type = other DNA
gacatcatggctcacagcatgggtggcgcg

SEQ ID NO: 1379 - DNA, 30 bp, synthetic construct
  source 1..30: mol_type = other DNA
gacatcaccgctcacagcatgggtggcgcg

SEQ ID NO: 1380 - DNA, 30 bp, synthetic construct
  source 1..30: mol_type = other DNA
gacatcaacgctcacagcatgggtggcgcg

SEQ ID NO: 1381 - DNA, 30 bp, synthetic construct
  source 1..30: mol_type = other DNA
gacatcaaagctcacagcatgggtggcgcg

SEQ ID NO: 1382 - DNA, 30 bp, synthetic construct
  source 1..30: mol_type = other DNA
gacatcagcgctcacagcatgggtggcgcg

SEQ ID NO: 1383 - DNA, 30 bp, synthetic construct
  source 1..30: mol_type = other DNA
gacatccgtgctcacagcatgggtggcgcg

SEQ ID NO: 1384 - DNA, 30 bp, synthetic construct
  source 1..30: mol_type = other DNA
gacatcctggctcacagcatgggtggcgcg

SEQ ID NO: 1385 - DNA, 30 bp, synthetic construct
  source 1..30: mol_type = other DNA
gacatcccggctcacagcatgggtggcgcg

SEQ ID NO: 1386 - DNA, 30 bp, synthetic construct
  source 1..30: mol_type = other DNA
gacatccatgctcacagcatgggtggcgcg

SEQ ID NO: 1387 - DNA, 30 bp, synthetic construct
  source 1..30: mol_type = other DNA
gacatccaggctcacagcatgggtggcgcg

SEQ ID NO: 1388 - DNA, 30 bp, synthetic construct
  source 1..30: mol_type = other DNA
gacatcgcggctcacagcatgggtggcgcg

SEQ ID NO: 1389 - DNA, 30 bp, synthetic construct
  source 1..30: mol_type = other DNA
gacatcgatgctcacagcatgggtggcgcg

SEQ ID NO: 1390 - DNA, 30 bp, synthetic construct
  source 1..30: mol_type = other DNA
gacatcgaagctcacagcatgggtggcgcg

SEQ ID NO: 1391 - DNA, 30 bp, synthetic construct
  source 1..30: mol_type = other DNA
gacatcggcgctcacagcatgggtggcgcg

SEQ ID NO: 1392 - DNA, 30 bp, synthetic construct
  source 1..30: mol_type = other DNA
gacatctttgctcacagcatgggtggcgcg

SEQ ID NO: 1393 - DNA, 30 bp, synthetic construct
  source 1..30: mol_type = other DNA
gacatctatgctcacagcatgggtggcgcg

SEQ ID NO: 1394 - DNA, 30 bp, synthetic construct
  source 1..30: mol_type = other DNA
gacatctgcgctcacagcatgggtggcgcg

SEQ ID NO: 1395 - DNA, 30 bp, synthetic construct
  source 1..30: mol_type = other DNA
gacatctgggctcacagcatgggtggcgcg

SEQ ID NO: 1396 - DNA, 30 bp, synthetic construct
  source 1..30: mol_type = other DNA
gacatcgttattcacagcatgggtggcgcg

SEQ ID NO: 1397 - DNA, 30 bp, synthetic construct
  source 1..30: mol_type = other DNA
gacatcgttatgcacagcatgggtggcgcg

SEQ ID NO: 1398 - DNA, 30 bp, synthetic construct
  source 1..30: mol_type = other DNA
gacatcgttacccacagcatgggtggcgcg

SEQ ID NO: 1399 - DNA, 30 bp, synthetic construct
  source 1..30: mol_type = other DNA
gacatcgttaaccacagcatgggtggcgcg

SEQ ID NO: 1400 - DNA, 30 bp, synthetic construct
  source 1..30: mol_type = other DNA
gacatcgttaaacacagcatgggtggcgcg

SEQ ID NO: 1401 - DNA, 30 bp, synthetic construct
  source 1..30: mol_type = other DNA
gacatcgttagccacagcatgggtggcgcg

SEQ ID NO: 1402 - DNA, 30 bp, synthetic construct
  source 1..30: mol_type = other DNA
gacatcgttcgtcacagcatgggtggcgcg

SEQ ID NO: 1403 - DNA, 30 bp, synthetic construct
  source 1..30: mol_type = other DNA
gacatcgttctgcacagcatgggtggcgcg

SEQ ID NO: 1404 - DNA, 30 bp, synthetic construct
  source 1..30: mol_type = other DNA
gacatcgttccgcacagcatgggtggcgcg

SEQ ID NO: 1405 - DNA, 30 bp, synthetic construct
  source 1..30: mol_type = other DNA
gacatcgttcatcacagcatgggtggcgcg

SEQ ID NO: 1406 - DNA, 30 bp, synthetic construct
  source 1..30: mol_type = other DNA
gacatcgttcagcacagcatgggtggcgcg

SEQ ID NO: 1407 - DNA, 30 bp, synthetic construct
  source 1..30: mol_type = other DNA
gacatcgttgtgcacagcatgggtggcgcg

SEQ ID NO: 1408 - DNA, 30 bp, synthetic construct
  source 1..30: mol_type = other DNA
gacatcgttgatcacagcatgggtggcgcg

SEQ ID NO: 1409 - DNA, 30 bp, synthetic construct
  source 1..30: mol_type = other DNA
gacatcgttgaacacagcatgggtggcgcg

SEQ ID NO: 1410 - DNA, 30 bp, synthetic construct
  source 1..30: mol_type = other DNA
gacatcgttggccacagcatgggtggcgcg

SEQ ID NO: 1411 - DNA, 30 bp, synthetic construct
  source 1..30: mol_type = other DNA
gacatcgtttttcacagcatgggtggcgcg

SEQ ID NO: 1412 - DNA, 30 bp, synthetic construct
  source 1..30: mol_type = other DNA
gacatcgtttatcacagcatgggtggcgcg

SEQ ID NO: 1413 - DNA, 30 bp, synthetic construct
  source 1..30: mol_type = other DNA
gacatcgtttgccacagcatgggtggcgcg

SEQ ID NO: 1414 - DNA, 30 bp, synthetic construct
  source 1..30: mol_type = other DNA
gacatcgtttggcacagcatgggtggcgcg

SEQ ID NO: 1415 - DNA, 30 bp, synthetic construct
  source 1..30: mol_type = other DNA
gacatcgttgctattagcatgggtggcgcg

SEQ ID NO: 1416 - DNA, 30 bp, synthetic construct
  source 1..30: mol_type = other DNA
gacatcgttgctatgagcatgggtggcgcg

SEQ ID NO: 1417 - DNA, 30 bp, synthetic construct
  source 1..30: mol_type = other DNA
gacatcgttgctaccagcatgggtggcgcg

SEQ ID NO: 1418 - DNA, 30 bp, synthetic construct
  source 1..30: mol_type = other DNA
gacatcgttgctaacagcatgggtggcgcg

SEQ ID NO: 1419 - DNA, 30 bp, synthetic construct
  source 1..30: mol_type = other DNA
gacatcgttgctaaaagcatgggtggcgcg

SEQ ID NO: 1420 - DNA, 30 bp, synthetic construct
  source 1..30: mol_type = other DNA
gacatcgttgctagcagcatgggtggcgcg

SEQ ID NO: 1421 - DNA, 30 bp, synthetic construct
  source 1..30: mol_type = other DNA
gacatcgttgctcgtagcatgggtggcgcg

SEQ ID NO: 1422 - DNA, 30 bp, synthetic construct
  source 1..30: mol_type = other DNA
gacatcgttgctctgagcatgggtggcgcg

SEQ ID NO: 1423 - DNA, 30 bp, synthetic construct
  source 1..30: mol_type = other DNA
gacatcgttgctccgagcatgggtggcgcg

SEQ ID NO: 1424 - DNA, 30 bp, synthetic construct
  source 1..30: mol_type = other DNA
gacatcgttgctcagagcatgggtggcgcg

SEQ ID NO: 1425 - DNA, 30 bp, synthetic construct
  source 1..30: mol_type = other DNA
gacatcgttgctgtgagcatgggtggcgcg

SEQ ID NO: 1426 - DNA, 30 bp, synthetic construct
  source 1..30: mol_type = other DNA
gacatcgttgctgcgagcatgggtggcgcg

SEQ ID NO: 1427 - DNA, 30 bp, synthetic construct
  source 1..30: mol_type = other DNA
gacatcgttgctgatagcatgggtggcgcg

SEQ ID NO: 1428 - DNA, 30 bp, synthetic construct
  source 1..30: mol_type = other DNA
gacatcgttgctgaaagcatgggtggcgcg

SEQ ID NO: 1429 - DNA, 30 bp, synthetic construct
  source 1..30: mol_type = other DNA
gacatcgttgctggcagcatgggtggcgcg

SEQ ID NO: 1430 - DNA, 30 bp, synthetic construct
  source 1..30: mol_type = other DNA
gacatcgttgcttttagcatgggtggcgcg

SEQ ID NO: 1431 - DNA, 30 bp, synthetic construct
  source 1..30: mol_type = other DNA
gacatcgttgcttatagcatgggtggcgcg

SEQ ID NO: 1432 - DNA, 30 bp, synthetic construct
  source 1..30: mol_type = other DNA
gacatcgttgcttgcagcatgggtggcgcg

SEQ ID NO: 1433 - DNA, 30 bp, synthetic construct
  source 1..30: mol_type = other DNA
gacatcgttgcttggagcatgggtggcgcg

SEQ ID NO: 1434 - DNA, 30 bp, synthetic construct
  source 1..30: mol_type = other DNA
gacatcgttgctcacattatgggtggcgcg

SEQ ID NO: 1435 - DNA, 30 bp, synthetic construct
  source 1..30: mol_type = other DNA
gacatcgttgctcacatgatgggtggcgcg

SEQ ID NO: 1436 - DNA, 30 bp, synthetic construct
  source 1..30: mol_type = other DNA
gacatcgttgctcacaccatgggtggcgcg

SEQ ID NO: 1437 - DNA, 30 bp, synthetic construct
  source 1..30: mol_type = other DNA
gacatcgttgctcacaacatgggtggcgcg

SEQ ID NO: 1438 - DNA, 30 bp, synthetic construct
  source 1..30: mol_type = other DNA
gacatcgttgctcacaaaatgggtggcgcg

SEQ ID NO: 1439 - DNA, 30 bp, synthetic construct
  source 1..30: mol_type = other DNA
gacatcgttgctcaccgtatgggtggcgcg

SEQ ID NO: 1440 - DNA, 30 bp, synthetic construct
  source 1..30: mol_type = other DNA
gacatcgttgctcacctgatgggtggcgcg

SEQ ID NO: 1441 - DNA, 30 bp, synthetic construct
  source 1..30: mol_type = other DNA
gacatcgttgctcacccgatgggtggcgcg

SEQ ID NO: 1442 - DNA, 30 bp, synthetic construct
  source 1..30: mol_type = other DNA
gacatcgttgctcaccatatgggtggcgcg

SEQ ID NO: 1443 - DNA, 30 bp, synthetic construct
  source 1..30: mol_type = other DNA
gacatcgttgctcaccagatgggtggcgcg

SEQ ID NO: 1444 - DNA, 30 bp, synthetic construct
  source 1..30: mol_type = other DNA
gacatcgttgctcacgtgatgggtggcgcg

SEQ ID NO: 1445 - DNA, 30 bp, synthetic construct
  source 1..30: mol_type = other DNA
gacatcgttgctcacgcgatgggtggcgcg

SEQ ID NO: 1446 - DNA, 30 bp, synthetic construct
  source 1..30: mol_type = other DNA
gacatcgttgctcacgatatgggtggcgcg

SEQ ID NO: 1447 - DNA, 30 bp, synthetic construct
  source 1..30: mol_type = other DNA
gacatcgttgctcacgaaatgggtggcgcg

SEQ ID NO: 1448 - DNA, 30 bp, synthetic construct
  source 1..30: mol_type = other DNA
gacatcgttgctcacggcatgggtggcgcg

SEQ ID NO: 1449 - DNA, 30 bp, synthetic construct
  source 1..30: mol_type = other DNA
gacatcgttgctcactttatgggtggcgcg

SEQ ID NO: 1450 - DNA, 30 bp, synthetic construct
  source 1..30: mol_type = other DNA
gacatcgttgctcactatatgggtggcgcg

SEQ ID NO: 1451 - DNA, 30 bp, synthetic construct
  source 1..30: mol_type = other DNA
gacatcgttgctcactgcatgggtggcgcg

SEQ ID NO: 1452 - DNA, 30 bp, synthetic construct
  source 1..30: mol_type = other DNA
gacatcgttgctcactggatgggtggcgcg

SEQ ID NO: 1453 - DNA, 30 bp, synthetic construct
  source 1..30: mol_type = other DNA
gacatcgttgctcacagcattggtggcgcg

SEQ ID NO: 1454 - DNA, 30 bp, synthetic construct
  source 1..30: mol_type = other DNA
gacatcgttgctcacagcaccggtggcgcg

SEQ ID NO: 1455 - DNA, 30 bp, synthetic construct
  source 1..30: mol_type = other DNA
gacatcgttgctcacagcaacggtggcgcg

SEQ ID NO: 1456 - DNA, 30 bp, synthetic construct
  source 1..30: mol_type = other DNA
gacatcgttgctcacagcaaaggtggcgcg

SEQ ID NO: 1457 - DNA, 30 bp, synthetic construct
  source 1..30: mol_type = other DNA
gacatcgttgctcacagcagcggtggcgcg

SEQ ID NO: 1458 - DNA, 30 bp, synthetic construct
  source 1..30: mol_type = other DNA
gacatcgttgctcacagccgtggtggcgcg

SEQ ID NO: 1459 - DNA, 30 bp, synthetic construct
  source 1..30: mol_type = other DNA
gacatcgttgctcacagcctgggtggcgcg

SEQ ID NO: 1460 - DNA, 30 bp, synthetic construct
  source 1..30: mol_type = other DNA
gacatcgttgctcacagcccgggtggcgcg

SEQ ID NO: 1461 - DNA, 30 bp, synthetic construct
  source 1..30: mol_type = other DNA
gacatcgttgctcacagccatggtggcgcg

SEQ ID NO: 1462 - DNA, 30 bp, synthetic construct
  source 1..30: mol_type = other DNA
gacatcgttgctcacagccagggtggcgcg

SEQ ID NO: 1463 - DNA, 30 bp, synthetic construct
  source 1..30: mol_type = other DNA
gacatcgttgctcacagcgtgggtggcgcg

SEQ ID NO: 1464 - DNA, 30 bp, synthetic construct
  source 1..30: mol_type = other DNA
gacatcgttgctcacagcgcgggtggcgcg

SEQ ID NO: 1465 - DNA, 30 bp, synthetic construct
  source 1..30: mol_type = other DNA
gacatcgttgctcacagcgatggtggcgcg

SEQ ID NO: 1466 - DNA, 30 bp, synthetic construct
  source 1..30: mol_type = other DNA
gacatcgttgctcacagcgaaggtggcgcg

SEQ ID NO: 1467 - DNA, 30 bp, synthetic construct
  source 1..30: mol_type = other DNA
gacatcgttgctcacagcggcggtggcgcg

SEQ ID NO: 1468 - DNA, 30 bp, synthetic construct
  source 1..30: mol_type = other DNA
gacatcgttgctcacagctttggtggcgcg

SEQ ID NO: 1469 - DNA, 30 bp, synthetic construct
  source 1..30: mol_type = other DNA
gacatcgttgctcacagctatggtggcgcg

SEQ ID NO: 1470 - DNA, 30 bp, synthetic construct
  source 1..30: mol_type = other DNA
gacatcgttgctcacagctgcggtggcgcg

SEQ ID NO: 1471 - DNA, 30 bp, synthetic construct
  source 1..30: mol_type = other DNA
gacatcgttgctcacagctggggtggcgcg

SEQ ID NO: 1472 - DNA, 30 bp, synthetic construct
  source 1..30: mol_type = other DNA
gacatcgttgctcacagcatgattggcgcg

SEQ ID NO: 1473 - DNA, 30 bp, synthetic construct
  source 1..30: mol_type = other DNA
gacatcgttgctcacagcatgatgggcgcg

SEQ ID NO: 1474 - DNA, 30 bp, synthetic construct
  source 1..30: mol_type = other DNA
gacatcgttgctcacagcatgaccggcgcg

SEQ ID NO: 1475 - DNA, 30 bp, synthetic construct
  source 1..30: mol_type = other DNA
gacatcgttgctcacagcatgaacggcgcg

SEQ ID NO: 1476 - DNA, 30 bp, synthetic construct
  source 1..30: mol_type = other DNA
gacatcgttgctcacagcatgaaaggcgcg

SEQ ID NO: 1477 - DNA, 30 bp, synthetic construct
  source 1..30: mol_type = other DNA
gacatcgttgctcacagcatgagcggcgcg

SEQ ID NO: 1478 - DNA, 30 bp, synthetic construct
  source 1..30: mol_type = other DNA
gacatcgttgctcacagcatgcgtggcgcg

SEQ ID NO: 1479 - DNA, 30 bp, synthetic construct
  source 1..30: mol_type = other DNA
gacatcgttgctcacagcatgctgggcgcg

SEQ ID NO: 1480 - DNA, 30 bp, synthetic construct
  source 1..30: mol_type = other DNA
gacatcgttgctcacagcatgccgggcgcg

SEQ ID NO: 1481 - DNA, 30 bp, synthetic construct
  source 1..30: mol_type = other DNA
gacatcgttgctcacagcatgcatggcgcg

SEQ ID NO: 1482 - DNA, 30 bp, synthetic construct
  source 1..30: mol_type = other DNA
gacatcgttgctcacagcatgcagggcgcg

SEQ ID NO: 1483 - DNA, 30 bp, synthetic construct
  source 1..30: mol_type = other DNA
gacatcgttgctcacagcatggtgggcgcg

SEQ ID NO: 1484 - DNA, 30 bp, synthetic construct
  source 1..30: mol_type = other DNA
gacatcgttgctcacagcatggcgggcgcg

SEQ ID NO: 1485 - DNA, 30 bp, synthetic construct
  source 1..30: mol_type = other DNA
gacatcgttgctcacagcatggatggcgcg

SEQ ID NO: 1486 - DNA, 30 bp, synthetic construct
  source 1..30: mol_type = other DNA
gacatcgttgctcacagcatggaaggcgcg

SEQ ID NO: 1487 - DNA, 30 bp, synthetic construct
  source 1..30: mol_type = other DNA
gacatcgttgctcacagcatgtttggcgcg

SEQ ID NO: 1488 - DNA, 30 bp, synthetic construct
  source 1..30: mol_type = other DNA
gacatcgttgctcacagcatgtatggcgcg

SEQ ID NO: 1489 - DNA, 30 bp, synthetic construct
  source 1..30: mol_type = other DNA
gacatcgttgctcacagcatgtgcggcgcg

SEQ ID NO: 1490 - DNA, 30 bp, synthetic construct
  source 1..30: mol_type = other DNA
gacatcgttgctcacagcatgtggggcgcg

SEQ ID NO: 1491 - DNA, 30 bp, synthetic construct
  source 1..30: mol_type = other DNA
gacatcgttgctcacagcatgggtattgcg

SEQ ID NO: 1492 - DNA, 30 bp, synthetic construct
  source 1..30: mol_type = other DNA
gacatcgttgctcacagcatgggtatggcg

SEQ ID NO: 1493 - DNA, 30 bp, synthetic construct
  source 1..30: mol_type = other DNA
gacatcgttgctcacagcatgggtaccgcg

SEQ ID NO: 1494 - DNA, 30 bp, synthetic construct
  source 1..30: mol_type = other DNA
gacatcgttgctcacagcatgggtaacgcg

SEQ ID NO: 1495 - DNA, 30 bp, synthetic construct
  source 1..30: mol_type = other DNA
gacatcgttgctcacagcatgggtaaagcg

SEQ ID NO: 1496 - DNA, 30 bp, synthetic construct
  source 1..30: mol_type = other DNA
gacatcgttgctcacagcatgggtagcgcg

SEQ ID NO: 1497 - DNA, 30 bp, synthetic construct
  source 1..30: mol_type = other DNA
gacatcgttgctcacagcatgggtcgtgcg

SEQ ID NO: 1498 - DNA, 30 bp, synthetic construct
  source 1..30: mol_type = other DNA
gacatcgttgctcacagcatgggtctggcg

SEQ ID NO: 1499 - DNA, 30 bp, synthetic construct
  source 1..30: mol_type = other DNA
gacatcgttgctcacagcatgggtccggcg

SEQ ID NO: 1500 - DNA, 30 bp, synthetic construct
  source 1..30: mol_type = other DNA
gacatcgttgctcacagcatgggtcatgcg

SEQ ID NO: 1501 - DNA, 30 bp, synthetic construct
  source 1..30: mol_type = other DNA
gacatcgttgctcacagcatgggtcaggcg

SEQ ID NO: 1502 - DNA, 30 bp, synthetic construct
  source 1..30: mol_type = other DNA
gacatcgttgctcacagcatgggtgtggcg

SEQ ID NO: 1503 - DNA, 30 bp, synthetic construct
  source 1..30: mol_type = other DNA
gacatcgttgctcacagcatgggtgcggcg

SEQ ID NO: 1504 - DNA, 30 bp, synthetic construct
  source 1..30: mol_type = other DNA
gacatcgttgctcacagcatgggtgatgcg

SEQ ID NO: 1505 - DNA, 30 bp, synthetic construct
  source 1..30: mol_type = other DNA
gacatcgttgctcacagcatgggtgaagcg

SEQ ID NO: 1506 - DNA, 30 bp, synthetic construct
  source 1..30: mol_type = other DNA
gacatcgttgctcacagcatgggttttgcg

SEQ ID NO: 1507 - DNA, 30 bp, synthetic construct
  source 1..30: mol_type = other DNA
gacatcgttgctcacagcatgggttatgcg

SEQ ID NO: 1508 - DNA, 30 bp, synthetic construct
  source 1..30: mol_type = other DNA
gacatcgttgctcacagcatgggttgcgcg

SEQ ID NO: 1509 - DNA, 30 bp, synthetic construct
  source 1..30: mol_type = other DNA
gacatcgttgctcacagcatgggttgggcg

SEQ ID NO: 1510 - DNA, 30 bp, synthetic construct
  source 1..30: mol_type = other DNA
gacatcgttgctcacagcatgggtggcatt

SEQ ID NO: 1511 - DNA, 30 bp, synthetic construct
  source 1..30: mol_type = other DNA
gacatcgttgctcacagcatgggtggcatg

SEQ ID NO: 1512 - DNA, 30 bp, synthetic construct
  source 1..30: mol_type = other DNA
gacatcgttgctcacagcatgggtggcacc

SEQ ID NO: 1513 - DNA, 30 bp, synthetic construct
  source 1..30: mol_type = other DNA
gacatcgttgctcacagcatgggtggcaac

SEQ ID NO: 1514 - DNA, 30 bp, synthetic construct
  source 1..30: mol_type = other DNA
gacatcgttgctcacagcatgggtggcaaa

SEQ ID NO: 1515 - DNA, 30 bp, synthetic construct
  source 1..30: mol_type = other DNA
gacatcgttgctcacagcatgggtggcagc

SEQ ID NO: 1516 - DNA, 30 bp, synthetic construct
  source 1..30: mol_type = other DNA
gacatcgttgctcacagcatgggtggccgt

SEQ ID NO: 1517 - DNA, 30 bp, synthetic construct
  source 1..30: mol_type = other DNA
gacatcgttgctcacagcatgggtggcctg

SEQ ID NO: 1518 - DNA, 30 bp, synthetic construct
  source 1..30: mol_type = other DNA
gacatcgttgctcacagcatgggtggcccg

SEQ ID NO: 1519 - DNA, 30 bp, synthetic construct
  source 1..30: mol_type = other DNA
gacatcgttgctcacagcatgggtggccat

SEQ ID NO: 1520 - DNA, 30 bp, synthetic construct
  source 1..30: mol_type = other DNA
gacatcgttgctcacagcatgggtggccag

SEQ ID NO: 1521 - DNA, 30 bp, synthetic construct
  source 1..30: mol_type = other DNA
gacatcgttgctcacagcatgggtggcgtg

SEQ ID NO: 1522 - DNA, 30 bp, synthetic construct
  source 1..30: mol_type = other DNA
gacatcgttgctcacagcatgggtggcgat

SEQ ID NO: 1523 - DNA, 30 bp, synthetic construct
  source 1..30: mol_type = other DNA
gacatcgttgctcacagcatgggtggcgaa

SEQ ID NO: 1524 - DNA, 30 bp, synthetic construct
  source 1..30: mol_type = other DNA
gacatcgttgctcacagcatgggtggcggc

SEQ ID NO: 1525 - DNA, 30 bp, synthetic construct
  source 1..30: mol_type = other DNA
gacatcgttgctcacagcatgggtggcttt

SEQ ID NO: 1526 - DNA, 30 bp, synthetic construct
  source 1..30: mol_type = other DNA
gacatcgttgctcacagcatgggtggctat

SEQ ID NO: 1527 - DNA, 30 bp, synthetic construct
  source 1..30: mol_type = other DNA
gacatcgttgctcacagcatgggtggctgc

SEQ ID NO: 1528 - DNA, 30 bp, synthetic construct
  source 1..30: mol_type = other DNA
gacatcgttgctcacagcatgggtggctgg

SEQ ID NO: 1529 - DNA, 30 bp, Bacillus subtilis
  source 1..30: mol_type = genomic DNA
aacactctgtattacatcaaaaacctggac

SEQ ID NO: 1530 - DNA, 30 bp, synthetic construct
  source 1..30: mol_type = other DNA
attactctgtattacatcaaaaacctggac

SEQ ID NO: 1531 - DNA, 30 bp, synthetic construct
  source 1..30: mol_type = other DNA
atgactctgtattacatcaaaaacctggac

SEQ ID NO: 1532 - DNA, 30 bp, synthetic construct
  source 1..30: mol_type = other DNA
accactctgtattacatcaaaaacctggac

SEQ ID NO: 1533 - DNA, 30 bp, synthetic construct
  source 1..30: mol_type = other DNA
aaaactctgtattacatcaaaaacctggac

SEQ ID NO: 1534 - DNA, 30 bp, synthetic construct
  source 1..30: mol_type = other DNA
agcactctgtattacatcaaaaacctggac

SEQ ID NO: 1535 - DNA, 30 bp, synthetic construct
  source 1..30: mol_type = other DNA
cgtactctgtattacatcaaaaacctggac

SEQ ID NO: 1536 - DNA, 30 bp, synthetic construct
  source 1..30: mol_type = other DNA
ctgactctgtattacatcaaaaacctggac

SEQ ID NO: 1537 - DNA, 30 bp, synthetic construct
  source 1..30: mol_type = other DNA
ccgactctgtattacatcaaaaacctggac

SEQ ID NO: 1538 - DNA, 30 bp, synthetic construct
  source 1..30: mol_type = other DNA
catactctgtattacatcaaaaacctggac

SEQ ID NO: 1539 - DNA, 30 bp, synthetic construct
  source 1..30: mol_type = other DNA
cagactctgtattacatcaaaaacctggac

SEQ ID NO: 1540 - DNA, 30 bp, synthetic construct
  source 1..30: mol_type = other DNA
gtgactctgtattacatcaaaaacctggac

SEQ ID NO: 1541 - DNA, 30 bp, synthetic construct
  source 1..30: mol_type = other DNA
gcgactctgtattacatcaaaaacctggac

SEQ ID NO: 1542 - DNA, 30 bp, synthetic construct
  source 1..30: mol_type = other DNA
gatactctgtattacatcaaaaacctggac

SEQ ID NO: 1543 - DNA, 30 bp, synthetic construct
  source 1..30: mol_type = other DNA
gaaactctgtattacatcaaaaacctggac

SEQ ID NO: 1544 - DNA, 30 bp, synthetic construct
  source 1..30: mol_type = other DNA
ggcactctgtattacatcaaaaacctggac

SEQ ID NO: 1545 - DNA, 30 bp, synthetic construct
  source 1..30: mol_type = other DNA
tttactctgtattacatcaaaaacctggac

SEQ ID NO: 1546 - DNA, 30 bp, synthetic construct
  source 1..30: mol_type = other DNA
tatactctgtattacatcaaaaacctggac

SEQ ID NO: 1547 - DNA, 30 bp, synthetic construct
  source 1..30: mol_type = other DNA
tgcactctgtattacatcaaaaacctggac

SEQ ID NO: 1548 - DNA, 30 bp, synthetic construct
  source 1..30: mol_type = other DNA
tggactctgtattacatcaaaaacctggac

SEQ ID NO: 1549 - DNA, 30 bp, synthetic construct
  source 1..30: mol_type = other DNA
aacattctgtattacatcaaaaacctggac

SEQ ID NO: 1550 - DNA, 30 bp, synthetic construct
  source 1..30: mol_type = other DNA
aacatgctgtattacatcaaaaacctggac

SEQ ID NO: 1551 - DNA, 30 bp, synthetic construct
  source 1..30: mol_type = other DNA
aacaacctgtattacatcaaaaacctggac

SEQ ID NO: 1552 - DNA, 30 bp, synthetic construct
  source 1..30: mol_type = other DNA
aacaaactgtattacatcaaaaacctggac

SEQ ID NO: 1553 - DNA, 30 bp, synthetic construct
  source 1..30: mol_type = other DNA
aacagcctgtattacatcaaaaacctggac

SEQ ID NO: 1554 - DNA, 30 bp, synthetic construct
  source 1..30: mol_type = other DNA
aaccgtctgtattacatcaaaaacctggac

SEQ ID NO: 1555 - DNA, 30 bp, synthetic construct
  source 1..30: mol_type = other DNA
aacctgctgtattacatcaaaaacctggac

SEQ ID NO: 1556 - DNA, 30 bp, synthetic construct
  source 1..30: mol_type = other DNA
aacccgctgtattacatcaaaaacctggac

SEQ ID NO: 1557 - DNA, 30 bp, synthetic construct
  source 1..30: mol_type = other DNA
aaccatctgtattacatcaaaaacctggac

SEQ ID NO: 1558 - DNA, 30 bp, synthetic construct
  source 1..30: mol_type = other DNA
aaccagctgtattacatcaaaaacctggac

SEQ ID NO: 1559 - DNA, 30 bp, synthetic construct
  source 1..30: mol_type = other DNA
aacgtgctgtattacatcaaaaacctggac

SEQ ID NO: 1560 - DNA, 30 bp, synthetic construct
  source 1..30: mol_type = other DNA
aacgcgctgtattacatcaaaaacctggac

SEQ ID NO: 1561 - DNA, 30 bp, synthetic construct
  source 1..30: mol_type = other DNA
aacgatctgtattacatcaaaaacctggac

SEQ ID NO: 1562 - DNA, 30 bp, synthetic construct
  source 1..30: mol_type = other DNA
aacgaactgtattacatcaaaaacctggac

SEQ ID NO: 1563 - DNA, 30 bp, synthetic construct
  source 1..30: mol_type = other DNA
aacggcctgtattacatcaaaaacctggac

SEQ ID NO: 1564 - DNA, 30 bp, synthetic construct
  source 1..30: mol_type = other DNA
aactttctgtattacatcaaaaacctggac

SEQ ID NO: 1565 - DNA, 30 bp, synthetic construct
  source 1..30: mol_type = other DNA
aactatctgtattacatcaaaaacctggac

SEQ ID NO: 1566 - DNA, 30 bp, synthetic construct
  source 1..30: mol_type = other DNA
aactgcctgtattacatcaaaaacctggac

SEQ ID NO: 1567 - DNA, 30 bp, synthetic construct
  source 1..30: mol_type = other DNA
aactggctgtattacatcaaaaacctggac

SEQ ID NO: 1568 - DNA, 30 bp, synthetic construct
  source 1..30: mol_type = other DNA
aacactatttattacatcaaaaacctggac

SEQ ID NO: 1569 - DNA, 30 bp, synthetic construct
  source 1..30: mol_type = other DNA
aacactatgtattacatcaaaaacctggac

SEQ ID NO: 1570 - DNA, 30 bp, synthetic construct
  source 1..30: mol_type = other DNA
aacactacctattacatcaaaaacctggac

SEQ ID NO: 1571 - DNA, 30 bp, synthetic construct
  source 1..30: mol_type = other DNA
aacactaactattacatcaaaaacctggac

SEQ ID NO: 1572 - DNA, 30 bp, synthetic construct
  source 1..30: mol_type = other DNA
aacactaaatattacatcaaaaacctggac

SEQ ID NO: 1573 - DNA, 30 bp, synthetic construct
  source 1..30: mol_type = other DNA
aacactagctattacatcaaaaacctggac

SEQ ID NO: 1574 - DNA, 30 bp, synthetic construct
  source 1..30: mol_type = other DNA
aacactcgttattacatcaaaaacctggac

SEQ ID NO: 1575 - DNA, 30 bp, synthetic construct
  source 1..30: mol_type = other DNA
aacactccgtattacatcaaaaacctggac

SEQ ID NO: 1576 - DNA, 30 bp, synthetic construct
  source 1..30: mol_type = other DNA
aacactcattattacatcaaaaacctggac

SEQ ID NO: 1577 - DNA, 30 bp, synthetic construct
  source 1..30: mol_type = other DNA
aacactcagtattacatcaaaaacctggac

SEQ ID NO: 1578 - DNA, 30 bp, synthetic construct
  source 1..30: mol_type = other DNA
aacactgtgtattacatcaaaaacctggac

SEQ ID NO: 1579 - DNA, 30 bp, synthetic construct
  source 1..30: mol_type = other DNA
aacactgcgtattacatcaaaaacctggac

SEQ ID NO: 1580 - DNA, 30 bp, synthetic construct
  source 1..30: mol_type = other DNA
aacactgattattacatcaaaaacctggac

SEQ ID NO: 1581 - DNA, 30 bp, synthetic construct
  source 1..30: mol_type = other DNA
aacactgaatattacatcaaaaacctggac

SEQ ID NO: 1582 - DNA, 30 bp, synthetic construct
  source 1..30: mol_type = other DNA
aacactggctattacatcaaaaacctggac

SEQ ID NO: 1583 - DNA, 30 bp, synthetic construct
  source 1..30: mol_type = other DNA
aacactttttattacatcaaaaacctggac

SEQ ID NO: 1584 - DNA, 30 bp, synthetic construct
  source 1..30: mol_type = other DNA
aacacttattattacatcaaaaacctggac

SEQ ID NO: 1585 - DNA, 30 bp, synthetic construct
  source 1..30: mol_type = other DNA
aacacttgctattacatcaaaaacctggac

SEQ ID NO: 1586 - DNA, 30 bp, synthetic construct
  source 1..30: mol_type = other DNA
aacacttggtattacatcaaaaacctggac

SEQ ID NO: 1587 - DNA, 30 bp, synthetic construct
  source 1..30: mol_type = other DNA
aacactctgatttacatcaaaaacctggac

SEQ ID NO: 1588 - DNA, 30 bp, synthetic construct
  source 1..30: mol_type = other DNA
aacactctgatgtacatcaaaaacctggac

SEQ ID NO: 1589 - DNA, 30 bp, synthetic construct
  source 1..30: mol_type = other DNA
aacactctgacctacatcaaaaacctggac

SEQ ID NO: 1590 - DNA, 30 bp, synthetic construct
  source 1..30: mol_type = other DNA
aacactctgaactacatcaaaaacctggac

SEQ ID NO: 1591 - DNA, 30 bp, synthetic construct
  source 1..30: mol_type = other DNA
aacactctgaaatacatcaaaaacctggac

SEQ ID NO: 1592 - DNA, 30 bp, synthetic construct
  source 1..30: mol_type = other DNA
aacactctgagctacatcaaaaacctggac

SEQ ID NO: 1593 - DNA, 30 bp, synthetic construct
  source 1..30: mol_type = other DNA
aacactctgcgttacatcaaaaacctggac

SEQ ID NO: 1594 - DNA, 30 bp, synthetic construct
  source 1..30: mol_type = other DNA
aacactctgctgtacatcaaaaacctggac

SEQ ID NO: 1595 - DNA, 30 bp, synthetic construct
  source 1..30: mol_type = other DNA
aacactctgccgtacatcaaaaacctggac

SEQ ID NO: 1596 - DNA, 30 bp, synthetic construct
  source 1..30: mol_type = other DNA
aacactctgcattacatcaaaaacctggac

SEQ ID NO: 1597 - DNA, 30 bp, synthetic construct
  source 1..30: mol_type = other DNA
aacactctgcagtacatcaaaaacctggac

SEQ ID NO: 1598 - DNA, 30 bp, synthetic construct
  source 1..30: mol_type = other DNA
aacactctggtgtacatcaaaaacctggac

SEQ ID NO: 1599 - DNA, 30 bp, synthetic construct
  source 1..30: mol_type = other DNA
aacactctggcgtacatcaaaaacctggac

SEQ ID NO: 1600 - DNA, 30 bp, synthetic construct
  source 1..30: mol_type = other DNA
aacactctggattacatcaaaaacctggac

SEQ ID NO: 1601 - DNA, 30 bp, synthetic construct
  source 1..30: mol_type = other DNA
aacactctggaatacatcaaaaacctggac

SEQ ID NO: 1602 - DNA, 30 bp, synthetic construct
  source 1..30: mol_type = other DNA
aacactctgggctacatcaaaaacctggac

SEQ ID NO: 1603 - DNA, 30 bp, synthetic construct
  source 1..30: mol_type = other DNA
aacactctgttttacatcaaaaacctggac

SEQ ID NO: 1604 - DNA, 30 bp, synthetic construct
  source 1..30: mol_type = other DNA
aacactctgtgctacatcaaaaacctggac

SEQ ID NO: 1605 - DNA, 30 bp, synthetic construct
  source 1..30: mol_type = other DNA
aacactctgtggtacatcaaaaacctggac

SEQ ID NO: 1606 - DNA, 30 bp, synthetic construct
  source 1..30: mol_type = other DNA
aacactctgtatattatcaaaaacctggac

SEQ ID NO: 1607 - DNA, 30 bp, synthetic construct
  source 1..30: mol_type = other DNA
aacactctgtatatgatcaaaaacctggac

SEQ ID NO: 1608 - DNA, 30 bp, synthetic construct
  source 1..30: mol_type = other DNA
aacactctgtataccatcaaaaacctggac

SEQ ID NO: 1609 - DNA, 30 bp, synthetic construct
  source 1..30: mol_type = other DNA
aacactctgtataacatcaaaaacctggac

SEQ ID NO: 1610 - DNA, 30 bp, synthetic construct
  source 1..30: mol_type = other DNA
aacactctgtataaaatcaaaaacctggac

SEQ ID NO: 1611 - DNA, 30 bp, synthetic construct
  source 1..30: mol_type = other DNA
aacactctgtatagcatcaaaaacctggac

SEQ ID NO: 1612 - DNA, 30 bp, synthetic construct
  source 1..30: mol_type = other DNA
aacactctgtatcgtatcaaaaacctggac

SEQ ID NO: 1613 - DNA, 30 bp, synthetic construct
  source 1..30: mol_type = other DNA
aacactctgtatctgatcaaaaacctggac

SEQ ID NO: 1614 - DNA, 30 bp, synthetic construct
  source 1..30: mol_type = other DNA
aacactctgtatccgatcaaaaacctggac

SEQ ID NO: 1615 - DNA, 30 bp, synthetic construct
  source 1..30: mol_type = other DNA
aacactctgtatcatatcaaaaacctggac

SEQ ID NO: 1616 - DNA, 30 bp, synthetic construct
  source 1..30: mol_type = other DNA
aacactctgtatcagatcaaaaacctggac

SEQ ID NO: 1617 - DNA, 30 bp, synthetic construct
  source 1..30: mol_type = other DNA
aacactctgtatgtgatcaaaaacctggac

SEQ ID NO: 1618 - DNA, 30 bp, synthetic construct
  source 1..30: mol_type = other DNA
aacactctgtatgcgatcaaaaacctggac

SEQ ID NO: 1619 - DNA, 30 bp, synthetic construct
  source 1..30: mol_type = other DNA
aacactctgtatgatatcaaaaacctggac

SEQ ID NO: 1620 - DNA, 30 bp, synthetic construct
  source 1..30: mol_type = other DNA
aacactctgtatgaaatcaaaaacctggac

SEQ ID NO: 1621 - DNA, 30 bp, synthetic construct
  source 1..30: mol_type = other DNA
aacactctgtatggcatcaaaaacctggac

SEQ ID NO: 1622 - DNA, 30 bp, synthetic construct
  source 1..30: mol_type = other DNA
aacactctgtattttatcaaaaacctggac

SEQ ID NO: 1623 - DNA, 30 bp, synthetic construct
  source 1..30: mol_type = other DNA
aacactctgtattgcatcaaaaacctggac

SEQ ID NO: 1624 - DNA, 30 bp, synthetic construct
  source 1..30: mol_type = other DNA
aacactctgtattggatcaaaaacctggac

SEQ ID NO: 1625 - DNA, 30 bp, synthetic construct
  source 1..30: mol_type = other DNA
aacactctgtattacatgaaaaacctggac

SEQ ID NO: 1626 - DNA, 30 bp, synthetic construct
  source 1..30: mol_type = other DNA
aacactctgtattacaccaaaaacctggac

SEQ ID NO: 1627 - DNA, 30 bp, synthetic construct
  source 1..30: mol_type = other DNA
aacactctgtattacaacaaaaacctggac

SEQ ID NO: 1628 - DNA, 30 bp, synthetic construct
  source 1..30: mol_type = other DNA
aacactctgtattacaaaaaaaacctggac

SEQ ID NO: 1629 - DNA, 30 bp, synthetic construct
  source 1..30: mol_type = other DNA
aacactctgtattacagcaaaaacctggac

SEQ ID NO: 1630 - DNA, 30 bp, synthetic construct
  source 1..30: mol_type = other DNA
aacactctgtattaccgtaaaaacctggac

SEQ ID NO: 1631 - DNA, 30 bp, synthetic construct
  source 1..30: mol_type = other DNA
aacactctgtattacctgaaaaacctggac

SEQ ID NO: 1632 - DNA, 30 bp, synthetic construct
  source 1..30: mol_type = other DNA
aacactctgtattacccgaaaaacctggac

SEQ ID NO: 1633 - DNA, 30 bp, synthetic construct
  source 1..30: mol_type = other DNA
aacactctgtattaccataaaaacctggac

SEQ ID NO: 1634 - DNA, 30 bp, synthetic construct
  source 1..30: mol_type = other DNA
aacactctgtattaccagaaaaacctggac

SEQ ID NO: 1635 - DNA, 30 bp, synthetic construct
  source 1..30: mol_type = other DNA
aacactctgtattacgtgaaaaacctggac

SEQ ID NO: 1636 - DNA, 30 bp, synthetic construct
  source 1..30: mol_type = other DNA
aacactctgtattacgcgaaaaacctggac

SEQ ID NO: 1637 - DNA, 30 bp, synthetic construct
  source 1..30: mol_type = other DNA
aacactctgtattacgataaaaacctggac

SEQ ID NO: 1638 - DNA, 30 bp, synthetic construct
  source 1..30: mol_type = other DNA
aacactctgtattacgaaaaaaacctggac

SEQ ID NO: 1639 - DNA, 30 bp, synthetic construct
  source 1..30: mol_type = other DNA
aacactctgtattacggcaaaaacctggac

SEQ ID NO: 1640 - DNA, 30 bp, synthetic construct
  source 1..30: mol_type = other DNA
aacactctgtattactttaaaaacctggac

SEQ ID NO: 1641 - DNA, 30 bp, synthetic construct
  source 1..30: mol_type = other DNA
aacactctgtattactataaaaacctggac

SEQ ID NO: 1642 - DNA, 30 bp, synthetic construct
  source 1..30: mol_type = other DNA
aacactctgtattactgcaaaaacctggac

SEQ ID NO: 1643 - DNA, 30 bp, synthetic construct
  source 1..30: mol_type = other DNA
aacactctgtattactggaaaaacctggac

SEQ ID NO: 1644 - DNA, 30 bp, synthetic construct
  source 1..30: mol_type = other DNA
aacactctgtattacatcattaacctggac

SEQ ID NO: 1645 - DNA, 30 bp, synthetic construct
  source 1..30: mol_type = other DNA
aacactctgtattacatcatgaacctggac

SEQ ID NO: 1646 - DNA, 30 bp, synthetic construct
  source 1..30: mol_type = other DNA
aacactctgtattacatcaccaacctggac

SEQ ID NO: 1647 - DNA, 30 bp, synthetic construct
  source 1..30: mol_type = other DNA
aacactctgtattacatcaacaacctggac

SEQ ID NO: 1648 - DNA, 30 bp, synthetic construct
  source 1..30: mol_type = other DNA
aacactctgtattacatcagcaacctggac

SEQ ID NO: 1649 - DNA, 30 bp, synthetic construct
  source 1..30: mol_type = other DNA
aacactctgtattacatccgtaacctggac

SEQ ID NO: 1650 - DNA, 30 bp, synthetic construct
  source 1..30: mol_type = other DNA
aacactctgtattacatcctgaacctggac

SEQ ID NO: 1651 - DNA, 30 bp, synthetic construct
  source 1..30: mol_type = other DNA
aacactctgtattacatcccgaacctggac

SEQ ID NO: 1652 - DNA, 30 bp, synthetic construct
  source 1..30: mol_type = other DNA
aacactctgtattacatccataacctggac

SEQ ID NO: 1653 - DNA, 30 bp, synthetic construct
  source 1..30: mol_type = other DNA
aacactctgtattacatccagaacctggac

SEQ ID NO: 1654 - DNA, 30 bp, synthetic construct
  source 1..30: mol_type = other DNA
aacactctgtattacatcgtgaacctggac

SEQ ID NO: 1655 - DNA, 30 bp, synthetic construct
  source 1..30: mol_type = other DNA
aacactctgtattacatcgcgaacctggac

SEQ ID NO: 1656 - DNA, 30 bp, synthetic construct
  source 1..30: mol_type = other DNA
aacactctgtattacatcgataacctggac

SEQ ID NO: 1657 - DNA, 30 bp, synthetic construct
  source 1..30: mol_type = other DNA
aacactctgtattacatcgaaaacctggac

SEQ ID NO: 1658 - DNA, 30 bp, synthetic construct
  source 1..30: mol_type = other DNA
aacactctgtattacatcggcaacctggac

SEQ ID NO: 1659 - DNA, 30 bp, synthetic construct
  source 1..30: mol_type = other DNA
aacactctgtattacatctttaacctggac

SEQ ID NO: 1660 - DNA, 30 bp, synthetic construct
  source 1..30: mol_type = other DNA
aacactctgtattacatctataacctggac

SEQ ID NO: 1661 - DNA, 30 bp, synthetic construct
  source 1..30: mol_type = other DNA
aacactctgtattacatctgcaacctggac

SEQ ID NO: 1662 - DNA, 30 bp, synthetic construct
  source 1..30: mol_type = other DNA
aacactctgtattacatctggaacctggac

SEQ ID NO: 1663 - DNA, 30 bp, synthetic construct
  source 1..30: mol_type = other DNA
aacactctgtattacatcaaaattctggac

SEQ ID NO: 1664 - DNA, 30 bp, synthetic construct
  source 1..30: mol_type = other DNA
aacactctgtattacatcaaaatgctggac

SEQ ID NO: 1665 - DNA, 30 bp, synthetic construct
  source 1..30: mol_type = other DNA
aacactctgtattacatcaaaaccctggac

SEQ ID NO: 1666 - DNA, 30 bp, synthetic construct
  source 1..30: mol_type = other DNA
aacactctgtattacatcaaaaaactggac

SEQ ID NO: 1667 - DNA, 30 bp, synthetic construct
  source 1..30: mol_type = other DNA
aacactctgtattacatcaaaagcctggac

SEQ ID NO: 1668 - DNA, 30 bp, synthetic construct
  source 1..30: mol_type = other DNA
aacactctgtattacatcaaacgtctggac

SEQ ID NO: 1669 - DNA, 30 bp, synthetic construct
  source 1..30: mol_type = other DNA
aacactctgtattacatcaaactgctggac

SEQ ID NO: 1670 - DNA, 30 bp, synthetic construct
  source 1..30: mol_type = other DNA
aacactctgtattacatcaaaccgctggac

SEQ ID NO: 1671 - DNA, 30 bp, synthetic construct
  source 1..30: mol_type = other DNA
aacactctgtattacatcaaacatctggac

SEQ ID NO: 1672 - DNA, 30 bp, synthetic construct
  source 1..30: mol_type = other DNA
aacactctgtattacatcaaacagctggac

SEQ ID NO: 1673 - DNA, 30 bp, synthetic construct
  source 1..30: mol_type = other DNA
aacactctgtattacatcaaagtgctggac

SEQ ID NO: 1674 - DNA, 30 bp, synthetic construct
  source 1..30: mol_type = other DNA
aacactctgtattacatcaaagcgctggac

SEQ ID NO: 1675 - DNA, 30 bp, synthetic construct
  source 1..30: mol_type = other DNA
aacactctgtattacatcaaagatctggac

SEQ ID NO: 1676 - DNA, 30 bp, synthetic construct
  source 1..30: mol_type = other DNA
aacactctgtattacatcaaagaactggac

SEQ ID NO: 1677 - DNA, 30 bp, synthetic construct
  source 1..30: mol_type = other DNA
aacactctgtattacatcaaaggcctggac

SEQ ID NO: 1678 - DNA, 30 bp, synthetic construct
  source 1..30: mol_type = other DNA
aacactctgtattacatcaaatttctggac

SEQ ID NO: 1679 - DNA, 30 bp, synthetic construct
  source 1..30: mol_type = other DNA
aacactctgtattacatcaaatatctggac

SEQ ID NO: 1680 - DNA, 30 bp, synthetic construct
  source 1..30: mol_type = other DNA
aacactctgtattacatcaaatgcctggac

SEQ ID NO: 1681 - DNA, 30 bp, synthetic construct
  source 1..30: mol_type = other DNA
aacactctgtattacatcaaatggctggac

SEQ ID NO: 1682 - DNA, 30 bp, synthetic construct
  source 1..30: mol_type = other DNA
aacactctgtattacatcaaaaacattgac

SEQ ID NO: 1683 - DNA, 30 bp, synthetic construct
  source 1..30: mol_type = other DNA
aacactctgtattacatcaaaaacatggac

SEQ ID NO: 1684 - DNA, 30 bp, synthetic construct
  source 1..30: mol_type = other DNA
aacactctgtattacatcaaaaacaccgac

SEQ ID NO: 1685 - DNA, 30 bp, synthetic construct
  source 1..30: mol_type = other DNA
aacactctgtattacatcaaaaacaacgac

SEQ ID NO: 1686 - DNA, 30 bp, synthetic construct
  source 1..30: mol_type = other DNA
aacactctgtattacatcaaaaacaaagac

SEQ ID NO: 1687 - DNA, 30 bp, synthetic construct
  source 1..30: mol_type = other DNA
aacactctgtattacatcaaaaacagcgac

SEQ ID NO: 1688 - DNA, 30 bp, synthetic construct
  source 1..30: mol_type = other DNA
aacactctgtattacatcaaaaaccgtgac

SEQ ID NO: 1689 - DNA, 30 bp, synthetic construct
  source 1..30: mol_type = other DNA
aacactctgtattacatcaaaaacccggac

SEQ ID NO: 1690 - DNA, 30 bp, synthetic construct
  source 1..30: mol_type = other DNA
aacactctgtattacatcaaaaaccatgac

SEQ ID NO: 1691 - DNA, 30 bp, synthetic construct
  source 1..30: mol_type = other DNA
aacactctgtattacatcaaaaaccaggac

SEQ ID NO: 1692 - DNA, 30 bp, synthetic construct
  source 1..30: mol_type = other DNA
aacactctgtattacatcaaaaacgtggac

SEQ ID NO: 1693 - DNA, 30 bp, synthetic construct
  source 1..30: mol_type = other DNA
aacactctgtattacatcaaaaacgcggac

SEQ ID NO: 1694 - DNA, 30 bp, synthetic construct
  source 1..30: mol_type = other DNA
aacactctgtattacatcaaaaacgatgac

SEQ ID NO: 1695 - DNA, 30 bp, synthetic construct
  source 1..30: mol_type = other DNA
aacactctgtattacatcaaaaacgaagac

SEQ ID NO: 1696 - DNA, 30 bp, synthetic construct
  source 1..30: mol_type = other DNA
aacactctgtattacatcaaaaacggcgac

SEQ ID NO: 1697 - DNA, 30 bp, synthetic construct
  source 1..30: mol_type = other DNA
aacactctgtattacatcaaaaactttgac

SEQ ID NO: 1698 - DNA, 30 bp, synthetic construct
  source 1..30: mol_type = other DNA
aacactctgtattacatcaaaaactatgac

SEQ ID NO: 1699 - DNA, 30 bp, synthetic construct
  source 1..30: mol_type = other DNA
aacactctgtattacatcaaaaactgcgac

SEQ ID NO: 1700 - DNA, 30 bp, synthetic construct
  source 1..30: mol_type = other DNA
aacactctgtattacatcaaaaactgggac

SEQ ID NO: 1701 - DNA, 30 bp, synthetic construct
  source 1..30: mol_type = other DNA
aacactctgtattacatcaaaaacctgatt

SEQ ID NO: 1702 - DNA, 30 bp, synthetic construct
  source 1..30: mol_type = other DNA
aacactctgtattacatcaaaaacctgatg

SEQ ID NO: 1703 - DNA, 30 bp, synthetic construct
  source 1..30: mol_type = other DNA
aacactctgtattacatcaaaaacctgacc

SEQ ID NO: 1704 - DNA, 30 bp, synthetic construct
  source 1..30: mol_type = other DNA
aacactctgtattacatcaaaaacctgaac

SEQ ID NO: 1705 - DNA, 30 bp, synthetic construct
  source 1..30: mol_type = other DNA
aacactctgtattacatcaaaaacctgaaa

SEQ ID NO: 1706 - DNA, 30 bp, synthetic construct
  source 1..30: mol_type = other DNA
aacactctgtattacatcaaaaacctgagc

SEQ ID NO: 1707 - DNA, 30 bp, synthetic construct
  source 1..30: mol_type = other DNA
aacactctgtattacatcaaaaacctgcgt

SEQ ID NO: 1708 - DNA, 30 bp, synthetic construct
  source 1..30: mol_type = other DNA
aacactctgtattacatcaaaaacctgctg

SEQ ID NO: 1709 - DNA, 30 bp, synthetic construct
  source 1..30: mol_type = other DNA
aacactctgtattacatcaaaaacctgccg

SEQ ID NO: 1710 - DNA, 30 bp, synthetic construct
  source 1..30: mol_type = other DNA
aacactctgtattacatcaaaaacctgcat

SEQ ID NO: 1711 - DNA, 30 bp, synthetic construct
  source 1..30: mol_type = other DNA
aacactctgtattacatcaaaaacctgcag

SEQ ID NO: 1712 - DNA, 30 bp, synthetic construct
  source 1..30: mol_type = other DNA
aacactctgtattacatcaaaaacctggtg

SEQ ID NO: 1713 - DNA, 30 bp, synthetic construct
  source 1..30: mol_type = other DNA
aacactctgtattacatcaaaaacctggcg

SEQ ID NO: 1714 - DNA, 30 bp, synthetic construct
  source 1..30: mol_type = other DNA
aacactctgtattacatcaaaaacctggaa

SEQ ID NO: 1715 - DNA, 30 bp, synthetic construct
  source 1..30: mol_type = other DNA
aacactctgtattacatcaaaaacctgggc

SEQ ID NO: 1716 - DNA, 30 bp, synthetic construct
  source 1..30: mol_type = other DNA
aacactctgtattacatcaaaaacctgttt

SEQ ID NO: 1717 - DNA, 30 bp, synthetic construct
  source 1..30: mol_type = other DNA
aacactctgtattacatcaaaaacctgtat

SEQ ID NO: 1718 - DNA, 30 bp, synthetic construct
  source 1..30: mol_type = other DNA
aacactctgtattacatcaaaaacctgtgc

SEQ ID NO: 1719 - DNA, 30 bp, synthetic construct
  source 1..30: mol_type = other DNA
aacactctgtattacatcaaaaacctgtgg

SEQ ID NO: 1720 - DNA, 30 bp, Bacillus subtilis
  source 1..30: mol_type = genomic DNA
ggtggcaacaaggtagcgaacgttgtaact

SEQ ID NO: 1721 - DNA, 30 bp, synthetic construct
  source 1..30: mol_type = other DNA
attggcaacaaggtagcgaacgttgtaact

SEQ ID NO: 1722 - DNA, 30 bp, synthetic construct
  source 1..30: mol_type = other DNA
atgggcaacaaggtagcgaacgttgtaact

SEQ ID NO: 1723 - DNA, 30 bp, synthetic construct
  source 1..30: mol_type = other DNA
accggcaacaaggtagcgaacgttgtaact

SEQ ID NO: 1724 - DNA, 30 bp, synthetic construct
  source 1..30: mol_type = other DNA
aacggcaacaaggtagcgaacgttgtaact

SEQ ID NO: 1725 - DNA, 30 bp, synthetic construct
  source 1..30: mol_type = other DNA
aaaggcaacaaggtagcgaacgttgtaact

SEQ ID NO: 1726 - DNA, 30 bp, synthetic construct
  source 1..30: mol_type = other DNA
agcggcaacaaggtagcgaacgttgtaact

SEQ ID NO: 1727 - DNA, 30 bp, synthetic construct
  source 1..30: mol_type = other DNA
cgtggcaacaaggtagcgaacgttgtaact

SEQ ID NO: 1728 - DNA, 30 bp, synthetic construct
  source 1..30: mol_type = other DNA
ctgggcaacaaggtagcgaacgttgtaact

SEQ ID NO: 1729 - DNA, 30 bp, synthetic construct
  source 1..30: mol_type = other DNA
ccgggcaacaaggtagcgaacgttgtaact

SEQ ID NO: 1730 - DNA, 30 bp, synthetic construct
  source 1..30: mol_type = other DNA
catggcaacaaggtagcgaacgttgtaact

SEQ ID NO: 1731 - DNA, 30 bp, synthetic construct
  source 1..30: mol_type = other DNA
cagggcaacaaggtagcgaacgttgtaact

SEQ ID NO: 1732 - DNA, 30 bp, synthetic construct
  source 1..30: mol_type = other DNA
gtgggcaacaaggtagcgaacgttgtaact

SEQ ID NO: 1733 - DNA, 30 bp, synthetic construct
  source 1..30: mol_type = other DNA
gcgggcaacaaggtagcgaacgttgtaact

SEQ ID NO: 1734 - DNA, 30 bp, synthetic construct
  source 1..30: mol_type = other DNA
gatggcaacaaggtagcgaacgttgtaact

SEQ ID NO: 1735 - DNA, 30 bp, synthetic construct
  source 1..30: mol_type = other DNA
gaaggcaacaaggtagcgaacgttgtaact

SEQ ID NO: 1736 - DNA, 30 bp, synthetic construct
  source 1..30: mol_type = other DNA
tttggcaacaaggtagcgaacgttgtaact

SEQ ID NO: 1737 - DNA, 30 bp, synthetic construct
  source 1..30: mol_type = other DNA
tatggcaacaaggtagcgaacgttgtaact

SEQ ID NO: 1738 - DNA, 30 bp, synthetic construct
  source 1..30: mol_type = other DNA
tgcggcaacaaggtagcgaacgttgtaact

SEQ ID NO: 1739 - DNA, 30 bp, synthetic construct
  source 1..30: mol_type = other DNA
tggggcaacaaggtagcgaacgttgtaact

SEQ ID NO: 1740 - DNA, 30 bp, synthetic construct
  source 1..30: mol_type = other DNA
ggtattaacaaggtagcgaacgttgtaact

SEQ ID NO: 1741 - DNA, 30 bp, synthetic construct
  source 1..30: mol_type = other DNA
ggtatgaacaaggtagcgaacgttgtaact

SEQ ID NO: 1742 - DNA, 30 bp, synthetic construct
  source 1..30: mol_type = other DNA
ggtaccaacaaggtagcgaacgttgtaact

SEQ ID NO: 1743 - DNA, 30 bp, synthetic construct
  source 1..30: mol_type = other DNA
ggtaacaacaaggtagcgaacgttgtaact

SEQ ID NO: 1744 - DNA, 30 bp, synthetic construct
  source 1..30: mol_type = other DNA
ggtaaaaacaaggtagcgaacgttgtaact

SEQ ID NO: 1745 - DNA, 30 bp, synthetic construct
  source 1..30: mol_type = other DNA
ggtagcaacaaggtagcgaacgttgtaact

SEQ ID NO: 1746 - DNA, 30 bp, synthetic construct
  source 1..30: mol_type = other DNA
ggtcgtaacaaggtagcgaacgttgtaact

SEQ ID NO: 1747 - DNA, 30 bp, synthetic construct
  source 1..30: mol_type = other DNA
ggtctgaacaaggtagcgaacgttgtaact

SEQ ID NO: 1748 - DNA, 30 bp, synthetic construct
  source 1..30: mol_type = other DNA
ggtccgaacaaggtagcgaacgttgtaact

SEQ ID NO: 1749 - DNA, 30 bp, synthetic construct
  source 1..30: mol_type = other DNA
ggtcataacaaggtagcgaacgttgtaact

SEQ ID NO: 1750 - DNA, 30 bp, synthetic construct
  source 1..30: mol_type = other DNA
ggtcagaacaaggtagcgaacgttgtaact

SEQ ID NO: 1751 - DNA, 30 bp, synthetic construct
  source 1..30: mol_type = other DNA
ggtgtgaacaaggtagcgaacgttgtaact

SEQ ID NO: 1752 - DNA, 30 bp, synthetic construct
  source 1..30: mol_type = other DNA
ggtgcgaacaaggtagcgaacgttgtaact

SEQ ID NO: 1753 - DNA, 30 bp, synthetic construct
  source 1..30: mol_type = other DNA
ggtgataacaaggtagcgaacgttgtaact

SEQ ID NO: 1754 - DNA, 30 bp, synthetic construct
  source 1..30: mol_type = other DNA
ggtgaaaacaaggtagcgaacgttgtaact

SEQ ID NO: 1755 - DNA, 30 bp, synthetic construct
  source 1..30: mol_type = other DNA
ggttttaacaaggtagcgaacgttgtaact

SEQ ID NO: 1756 - DNA, 30 bp, synthetic construct
  source 1..30: mol_type = other DNA
ggttataacaaggtagcgaacgttgtaact

SEQ ID NO: 1757 - DNA, 30 bp, synthetic construct
  source 1..30: mol_type = other DNA
ggttgcaacaaggtagcgaacgttgtaact

SEQ ID NO: 1758 - DNA, 30 bp, synthetic construct
  source 1..30: mol_type = other DNA
ggttggaacaaggtagcgaacgttgtaact

SEQ ID NO: 1759 - DNA, 30 bp, synthetic construct
  source 1..30: mol_type = other DNA
ggtggcattaaggtagcgaacgttgtaact

SEQ ID NO: 1760 - DNA, 30 bp, synthetic construct
  source 1..30: mol_type = other DNA
ggtggcatgaaggtagcgaacgttgtaact

SEQ ID NO: 1761 - DNA, 30 bp, synthetic construct
  source 1..30: mol_type = other DNA
ggtggcaccaaggtagcgaacgttgtaact

SEQ ID NO: 1762 - DNA, 30 bp, synthetic construct
  source 1..30: mol_type = other DNA
ggtggcaaaaaggtagcgaacgttgtaact

SEQ ID NO: 1763 - DNA, 30 bp, synthetic construct
  source 1..30: mol_type = other DNA
ggtggcagcaaggtagcgaacgttgtaact

SEQ ID NO: 1764 - DNA, 30 bp, synthetic construct
  source 1..30: mol_type = other DNA
ggtggccgtaaggtagcgaacgttgtaact

SEQ ID NO: 1765 - DNA, 30 bp, synthetic construct
  source 1..30: mol_type = other DNA
ggtggcctgaaggtagcgaacgttgtaact

SEQ ID NO: 1766 - DNA, 30 bp, synthetic construct
  source 1..30: mol_type = other DNA
ggtggcccgaaggtagcgaacgttgtaact

SEQ ID NO: 1767 - DNA, 30 bp, synthetic construct
  source 1..30: mol_type = other DNA
ggtggccataaggtagcgaacgttgtaact

SEQ ID NO: 1768 - DNA, 30 bp, synthetic construct
  source 1..30: mol_type = other DNA
ggtggccagaaggtagcgaacgttgtaact

SEQ ID NO: 1769 - DNA, 30 bp, synthetic construct
  source 1..30: mol_type = other DNA
ggtggcgtgaaggtagcgaacgttgtaact

SEQ ID NO: 1770 - DNA, 30 bp, synthetic construct
  source 1..30: mol_type = other DNA
ggtggcgcgaaggtagcgaacgttgtaact

SEQ ID NO: 1771 - DNA, 30 bp, synthetic construct
  source 1..30: mol_type = other DNA
ggtggcgataaggtagcgaacgttgtaact

SEQ ID NO: 1772 - DNA, 30 bp, synthetic construct
  source 1..30: mol_type = other DNA
ggtggcgaaaaggtagcgaacgttgtaact

SEQ ID NO: 1773 - DNA, 30 bp, synthetic construct
  source 1..30: mol_type = other DNA
ggtggcggcaaggtagcgaacgttgtaact

SEQ ID NO: 1774 - DNA, 30 bp, synthetic construct
  source 1..30: mol_type = other DNA
ggtggctttaaggtagcgaacgttgtaact

SEQ ID NO: 1775 - DNA, 30 bp, synthetic construct
  source 1..30: mol_type = other DNA
ggtggctataaggtagcgaacgttgtaact

SEQ ID NO: 1776 - DNA, 30 bp, synthetic construct
  source 1..30: mol_type = other DNA
ggtggctgcaaggtagcgaacgttgtaact

SEQ ID NO: 1777 - DNA, 30 bp, synthetic construct
  source 1..30: mol_type = other DNA
ggtggctggaaggtagcgaacgttgtaact

SEQ ID NO: 1778 - DNA, 30 bp, synthetic construct
  source 1..30: mol_type = other DNA
ggtggcaacattgtagcgaacgttgtaact

SEQ ID NO: 1779 - DNA, 30 bp, synthetic construct
  source 1..30: mol_type = other DNA
ggtggcaacatggtagcgaacgttgtaact

SEQ ID NO: 1780 - DNA, 30 bp, synthetic construct
  source 1..30: mol_type = other DNA
ggtggcaacaccgtagcgaacgttgtaact

SEQ ID NO: 1781 - DNA, 30 bp, synthetic construct
  source 1..30: mol_type = other DNA
ggtggcaacaacgtagcgaacgttgtaact

SEQ ID NO: 1782 - DNA, 30 bp, synthetic construct
  source 1..30: mol_type = other DNA
ggtggcaacagcgtagcgaacgttgtaact

SEQ ID NO: 1783 - DNA, 30 bp, synthetic construct
  source 1..30: mol_type = other DNA
ggtggcaaccgtgtagcgaacgttgtaact

SEQ ID NO: 1784 - DNA, 30 bp, synthetic construct
  source 1..30: mol_type = other DNA
ggtggcaacctggtagcgaacgttgtaact

SEQ ID NO: 1785 - DNA, 30 bp, synthetic construct
  source 1..30: mol_type = other DNA
ggtggcaacccggtagcgaacgttgtaact

SEQ ID NO: 1786 - DNA, 30 bp, synthetic construct
  source 1..30: mol_type = other DNA
ggtggcaaccatgtagcgaacgttgtaact

SEQ ID NO: 1787 - DNA, 30 bp, synthetic construct
  source 1..30: mol_type = other DNA
ggtggcaaccaggtagcgaacgttgtaact

SEQ ID NO: 1788 - DNA, 30 bp, synthetic construct
  source 1..30: mol_type = other DNA
ggtggcaacgtggtagcgaacgttgtaact

SEQ ID NO: 1789 - DNA, 30 bp, synthetic construct
  source 1..30: mol_type = other DNA
ggtggcaacgcggtagcgaacgttgtaact

SEQ ID NO: 1790 - DNA, 30 bp, synthetic construct
  source 1..30: mol_type = other DNA
ggtggcaacgatgtagcgaacgttgtaact

SEQ ID NO: 1791 - DNA, 30 bp, synthetic construct
  source 1..30: mol_type = other DNA
ggtggcaacgaagtagcgaacgttgtaact

SEQ ID NO: 1792 - DNA, 30 bp, synthetic construct
  source 1..30: mol_type = other DNA
ggtggcaacggcgtagcgaacgttgtaact

SEQ ID NO: 1793 - DNA, 30 bp, synthetic construct
  source 1..30: mol_type = other DNA
ggtggcaactttgtagcgaacgttgtaact

SEQ ID NO: 1794 - DNA, 30 bp, synthetic construct
  source 1..30: mol_type = other DNA
ggtggcaactatgtagcgaacgttgtaact

SEQ ID NO: 1795 - DNA, 30 bp, synthetic construct
  source 1..30: mol_type = other DNA
ggtggcaactgcgtagcgaacgttgtaact

SEQ ID NO: 1796 - DNA, 30 bp, synthetic construct
  source 1..30: mol_type = other DNA
ggtggcaactgggtagcgaacgttgtaact

SEQ ID NO: 1797 - DNA, 30 bp, synthetic construct
  source 1..30: mol_type = other DNA
ggtggcaacaagattgcgaacgttgtaact

SEQ ID NO: 1798 - DNA, 30 bp, synthetic construct
  source 1..30: mol_type = other DNA
ggtggcaacaagatggcgaacgttgtaact

SEQ ID NO: 1799 - DNA, 30 bp, synthetic construct
  source 1..30: mol_type = other DNA
ggtggcaacaagaccgcgaacgttgtaact

SEQ ID NO: 1800 - DNA, 30 bp, synthetic construct
  source 1..30: mol_type = other DNA
ggtggcaacaagaacgcgaacgttgtaact

SEQ ID NO: 1801 - DNA, 30 bp, synthetic construct
  source 1..30: mol_type = other DNA
ggtggcaacaagaaagcgaacgttgtaact

SEQ ID NO: 1802 - DNA, 30 bp, synthetic construct
  source 1..30: mol_type = other DNA
ggtggcaacaagagcgcgaacgttgtaact

SEQ ID NO: 1803 - DNA, 30 bp, synthetic construct
  source 1..30: mol_type = other DNA
ggtggcaacaagcgtgcgaacgttgtaact

SEQ ID NO: 1804 - DNA, 30 bp, synthetic construct
  source 1..30: mol_type = other DNA
ggtggcaacaagctggcgaacgttgtaact

SEQ ID NO: 1805 - DNA, 30 bp, synthetic construct
  source 1..30: mol_type = other DNA
ggtggcaacaagccggcgaacgttgtaact

SEQ ID NO: 1806 - DNA, 30 bp, synthetic construct
  source 1..30: mol_type = other DNA
ggtggcaacaagcatgcgaacgttgtaact

SEQ ID NO: 1807 - DNA, 30 bp, synthetic construct
  source 1..30: mol_type = other DNA
ggtggcaacaagcaggcgaacgttgtaact

SEQ ID NO: 1808 - DNA, 30 bp, synthetic construct
  source 1..30: mol_type = other DNA
ggtggcaacaaggcggcgaacgttgtaact

SEQ ID NO: 1809 - DNA, 30 bp, synthetic construct
  source 1..30: mol_type = other DNA
ggtggcaacaaggatgcgaacgttgtaact

SEQ ID NO: 1810 - DNA, 30 bp, synthetic construct
  source 1..30: mol_type = other DNA
ggtggcaacaaggaagcgaacgttgtaact

SEQ ID NO: 1811 - DNA, 30 bp, synthetic construct
  source 1..30: mol_type = other DNA
ggtggcaacaagggcgcgaacgttgtaact

SEQ ID NO: 1812 - DNA, 30 bp, synthetic construct
  source 1..30: mol_type = other DNA
ggtggcaacaagtttgcgaacgttgtaact

SEQ ID NO: 1813 - DNA, 30 bp, synthetic construct
  source 1..30: mol_type = other DNA
ggtggcaacaagtatgcgaacgttgtaact

SEQ ID NO: 1814 - DNA, 30 bp, synthetic construct
  source 1..30: mol_type = other DNA
ggtggcaacaagtgcgcgaacgttgtaact

SEQ ID NO: 1815 - DNA, 30 bp, synthetic construct
  source 1..30: mol_type = other DNA
ggtggcaacaagtgggcgaacgttgtaact

SEQ ID NO: 1816 - DNA, 30 bp, synthetic construct
  source 1..30: mol_type = other DNA
ggtggcaacaaggtaattaacgttgtaact

SEQ ID NO: 1817 - DNA, 30 bp, synthetic construct
  source 1..30: mol_type = other DNA
ggtggcaacaaggtaatgaacgttgtaact

SEQ ID NO: 1818 - DNA, 30 bp, synthetic construct
  source 1..30: mol_type = other DNA
ggtggcaacaaggtaaccaacgttgtaact

SEQ ID NO: 1819 - DNA, 30 bp, synthetic construct
  source 1..30: mol_type = other DNA
ggtggcaacaaggtaaacaacgttgtaact

SEQ ID NO: 1820 - DNA, 30 bp, synthetic construct
  source 1..30: mol_type = other DNA
ggtggcaacaaggtaaaaaacgttgtaact

SEQ ID NO: 1821 - DNA, 30 bp, synthetic construct
  source 1..30: mol_type = other DNA
ggtggcaacaaggtaagcaacgttgtaact

SEQ ID NO: 1822 - DNA, 30 bp, synthetic construct
  source 1..30: mol_type = other DNA
ggtggcaacaaggtacgtaacgttgtaact

SEQ ID NO: 1823 - DNA, 30 bp, synthetic construct
  source 1..30: mol_type = other DNA
ggtggcaacaaggtactgaacgttgtaact

SEQ ID NO: 1824 - DNA, 30 bp, synthetic construct
  source 1..30: mol_type = other DNA
ggtggcaacaaggtaccgaacgttgtaact

SEQ ID NO: 1825 - DNA, 30 bp, synthetic construct
  source 1..30: mol_type = other DNA
ggtggcaacaaggtacataacgttgtaact

SEQ ID NO: 1826 - DNA, 30 bp, synthetic construct
  source 1..30: mol_type = other DNA
ggtggcaacaaggtacagaacgttgtaact

SEQ ID NO: 1827 - DNA, 30 bp, synthetic construct
  source 1..30: mol_type = other DNA
ggtggcaacaaggtagtgaacgttgtaact

SEQ ID NO: 1828 - DNA, 30 bp, synthetic construct
  source 1..30: mol_type = other DNA
ggtggcaacaaggtagataacgttgtaact

SEQ ID NO: 1829 - DNA, 30 bp, synthetic construct
  source 1..30: mol_type = other DNA
ggtggcaacaaggtagaaaacgttgtaact

SEQ ID NO: 1830 - DNA, 30 bp, synthetic construct
  source 1..30: mol_type = other DNA
ggtggcaacaaggtaggcaacgttgtaact

SEQ ID NO: 1831 - DNA, 30 bp, synthetic construct
  source 1..30: mol_type = other DNA
ggtggcaacaaggtatttaacgttgtaact

SEQ ID NO: 1832 - DNA, 30 bp, synthetic construct
  source 1..30: mol_type = other DNA
ggtggcaacaaggtatataacgttgtaact

SEQ ID NO: 1833 - DNA, 30 bp, synthetic construct
  source 1..30: mol_type = other DNA
ggtggcaacaaggtatgcaacgttgtaact

SEQ ID NO: 1834 - DNA, 30 bp, synthetic construct
  source 1..30: mol_type = other DNA
ggtggcaacaaggtatggaacgttgtaact

SEQ ID NO: 1835 - DNA, 30 bp, synthetic construct
  source 1..30: mol_type = other DNA
ggtggcaacaaggtagcgattgttgtaact

SEQ ID NO: 1836 - DNA, 30 bp, synthetic construct
  source 1..30: mol_type = other DNA
ggtggcaacaaggtagcgatggttgtaact

SEQ ID NO: 1837 - DNA, 30 bp, synthetic construct
  source 1..30: mol_type = other DNA
ggtggcaacaaggtagcgaccgttgtaact

SEQ ID NO: 1838 - DNA, 30 bp, synthetic construct
  source 1..30: mol_type = other DNA
ggtggcaacaaggtagcgaaagttgtaact

SEQ ID NO: 1839 - DNA, 30 bp, synthetic construct
  source 1..30: mol_type = other DNA
ggtggcaacaaggtagcgagcgttgtaact

SEQ ID NO: 1840 - DNA, 30 bp, synthetic construct
  source 1..30: mol_type = other DNA
ggtggcaacaaggtagcgcgtgttgtaact

SEQ ID NO: 1841 - DNA, 30 bp, synthetic construct
  source 1..30: mol_type = other DNA
ggtggcaacaaggtagcgctggttgtaact

SEQ ID NO: 1842 - DNA, 30 bp, synthetic construct
  source 1..30: mol_type = other DNA
ggtggcaacaaggtagcgccggttgtaact

SEQ ID NO: 1843 - DNA, 30 bp, synthetic construct
  source 1..30: mol_type = other DNA
ggtggcaacaaggtagcgcatgttgtaact

SEQ ID NO: 1844 - DNA, 30 bp, synthetic construct
  source 1..30: mol_type = other DNA
ggtggcaacaaggtagcgcaggttgtaact

SEQ ID NO: 1845 - DNA, 30 bp, synthetic construct
  source 1..30: mol_type = other DNA
ggtggcaacaaggtagcggtggttgtaact

SEQ ID NO: 1846 - DNA, 30 bp, synthetic construct
  source 1..30: mol_type = other DNA
ggtggcaacaaggtagcggcggttgtaact

SEQ ID NO: 1847 - DNA, 30 bp, synthetic construct
  source 1..30: mol_type = other DNA
ggtggcaacaaggtagcggatgttgtaact

SEQ ID NO: 1848 - DNA, 30 bp, synthetic construct
  source 1..30: mol_type = other DNA
ggtggcaacaaggtagcggaagttgtaact

SEQ ID NO: 1849 - DNA, 30 bp, synthetic construct
  source 1..30: mol_type = other DNA
ggtggcaacaaggtagcgggcgttgtaact

SEQ ID NO: 1850 - DNA, 30 bp, synthetic construct
  source 1..30: mol_type = other DNA
ggtggcaacaaggtagcgtttgttgtaact

SEQ ID NO: 1851 - DNA, 30 bp, synthetic construct
  source 1..30: mol_type = other DNA
ggtggcaacaaggtagcgtatgttgtaact

SEQ ID NO: 1852 - DNA, 30 bp, synthetic construct
  source 1..30: mol_type = other DNA
ggtggcaacaaggtagcgtgcgttgtaact

SEQ ID NO: 1853 - DNA, 30 bp, synthetic construct
  source 1..30: mol_type = other DNA
ggtggcaacaaggtagcgtgggttgtaact

SEQ ID NO: 1854 - DNA, 30 bp, synthetic construct
  source 1..30: mol_type = other DNA
ggtggcaacaaggtagcgaacattgtaact

SEQ ID NO: 1855 - DNA, 30 bp, synthetic construct
  source 1..30: mol_type = other DNA
ggtggcaacaaggtagcgaacatggtaact

SEQ ID NO: 1856 - DNA, 30 bp, synthetic construct
  source 1..30: mol_type = other DNA
ggtggcaacaaggtagcgaacaccgtaact

SEQ ID NO: 1857 - DNA, 30 bp, synthetic construct
  source 1..30: mol_type = other DNA
ggtggcaacaaggtagcgaacaacgtaact

SEQ ID NO: 1858 - DNA, 30 bp, synthetic construct
  source 1..30: mol_type = other DNA
ggtggcaacaaggtagcgaacaaagtaact

SEQ ID NO: 1859 - DNA, 30 bp, synthetic construct
  source 1..30: mol_type = other DNA
ggtggcaacaaggtagcgaacagcgtaact

SEQ ID NO: 1860 - DNA, 30 bp, synthetic construct
  source 1..30: mol_type = other DNA
ggtggcaacaaggtagcgaaccgtgtaact

SEQ ID NO: 1861 - DNA, 30 bp, synthetic construct
  source 1..30: mol_type = other DNA
ggtggcaacaaggtagcgaacctggtaact

SEQ ID NO: 1862 - DNA, 30 bp, synthetic construct
  source 1..30: mol_type = other DNA
ggtggcaacaaggtagcgaacccggtaact

SEQ ID NO: 1863 - DNA, 30 bp, synthetic construct
  source 1..30: mol_type = other DNA
ggtggcaacaaggtagcgaaccatgtaact

SEQ ID NO: 1864 - DNA, 30 bp, synthetic construct
  source 1..30: mol_type = other DNA
ggtggcaacaaggtagcgaaccaggtaact

SEQ ID NO: 1865 - DNA, 30 bp, synthetic construct
  source 1..30: mol_type = other DNA
ggtggcaacaaggtagcgaacgcggtaact

SEQ ID NO: 1866 - DNA, 30 bp, synthetic construct
  source 1..30: mol_type = other DNA
ggtggcaacaaggtagcgaacgatgtaact

SEQ ID NO: 1867 - DNA, 30 bp, synthetic construct
  source 1..30: mol_type = other DNA
ggtggcaacaaggtagcgaacgaagtaact

SEQ ID NO: 1868 - DNA, 30 bp, synthetic construct
  source 1..30: mol_type = other DNA
ggtggcaacaaggtagcgaacggcgtaact

SEQ ID NO: 1869 - DNA, 30 bp, synthetic construct
  source 1..30: mol_type = other DNA
ggtggcaacaaggtagcgaactttgtaact

SEQ ID NO: 1870 - DNA, 30 bp, synthetic construct
  source 1..30: mol_type = other DNA
ggtggcaacaaggtagcgaactatgtaact

SEQ ID NO: 1871 - DNA, 30 bp, synthetic construct
  source 1..30: mol_type = other DNA
ggtggcaacaaggtagcgaactgcgtaact

SEQ ID NO: 1872 - DNA, 30 bp, synthetic construct
  source 1..30: mol_type = other DNA
ggtggcaacaaggtagcgaactgggtaact

SEQ ID NO: 1873 - DNA, 30 bp, synthetic construct
  source 1..30: mol_type = other DNA
ggtggcaacaaggtagcgaacgttattact

SEQ ID NO: 1874 - DNA, 30 bp, synthetic construct
  source 1..30: mol_type = other DNA
ggtggcaacaaggtagcgaacgttatgact

SEQ ID NO: 1875 - DNA, 30 bp, synthetic construct
  source 1..30: mol_type = other DNA
ggtggcaacaaggtagcgaacgttaccact

SEQ ID NO: 1876 - DNA, 30 bp, synthetic construct
  source 1..30: mol_type = other DNA
ggtggcaacaaggtagcgaacgttaacact

SEQ ID NO: 1877 - DNA, 30 bp, synthetic construct
  source 1..30: mol_type = other DNA
ggtggcaacaaggtagcgaacgttaaaact

SEQ ID NO: 1878 - DNA, 30 bp, synthetic construct
  source 1..30: mol_type = other DNA
ggtggcaacaaggtagcgaacgttagcact

SEQ ID NO: 1879 - DNA, 30 bp, synthetic construct
  source 1..30: mol_type = other DNA
ggtggcaacaaggtagcgaacgttcgtact

SEQ ID NO: 1880 - DNA, 30 bp, synthetic construct
  source 1..30: mol_type = other DNA
ggtggcaacaaggtagcgaacgttctgact

SEQ ID NO: 1881 - DNA, 30 bp, synthetic construct
  source 1..30: mol_type = other DNA
ggtggcaacaaggtagcgaacgttccgact

SEQ ID NO: 1882 - DNA, 30 bp, synthetic construct
  source 1..30: mol_type = other DNA
ggtggcaacaaggtagcgaacgttcatact

SEQ ID NO: 1883 - DNA, 30 bp, synthetic construct
  source 1..30: mol_type = other DNA
ggtggcaacaaggtagcgaacgttcagact

SEQ ID NO: 1884 - DNA, 30 bp, synthetic construct
  source 1..30: mol_type = other DNA
ggtggcaacaaggtagcgaacgttgcgact

SEQ ID NO: 1885 - DNA, 30 bp, synthetic construct
  source 1..30: mol_type = other DNA
ggtggcaacaaggtagcgaacgttgatact

SEQ ID NO: 1886 - DNA, 30 bp, synthetic construct
  source 1..30: mol_type = other DNA
ggtggcaacaaggtagcgaacgttgaaact

SEQ ID NO: 1887 - DNA, 30 bp, synthetic construct
  source 1..30: mol_type = other DNA
ggtggcaacaaggtagcgaacgttggcact

SEQ ID NO: 1888 - DNA, 30 bp, synthetic construct
  source 1..30: mol_type = other DNA
ggtggcaacaaggtagcgaacgtttttact

SEQ ID NO: 1889 - DNA, 30 bp, synthetic construct
  source 1..30: mol_type = other DNA
ggtggcaacaaggtagcgaacgtttatact

SEQ ID NO: 1890 - DNA, 30 bp, synthetic construct
  source 1..30: mol_type = other DNA
ggtggcaacaaggtagcgaacgtttgcact

SEQ ID NO: 1891 - DNA, 30 bp, synthetic construct
  source 1..30: mol_type = other DNA
ggtggcaacaaggtagcgaacgtttggact

SEQ ID NO: 1892 - DNA, 30 bp, synthetic construct
  source 1..30: mol_type = other DNA
ggtggcaacaaggtagcgaacgttgtaatt

SEQ ID NO: 1893 - DNA, 30 bp, synthetic construct
  source 1..30: mol_type = other DNA
ggtggcaacaaggtagcgaacgttgtaatg

SEQ ID NO: 1894 - DNA, 30 bp, synthetic construct
  source 1..30: mol_type = other DNA
ggtggcaacaaggtagcgaacgttgtaaac

SEQ ID NO: 1895 - DNA, 30 bp, synthetic construct
  source 1..30: mol_type = other DNA
ggtggcaacaaggtagcgaacgttgtaaaa

SEQ ID NO: 1896 - DNA, 30 bp, synthetic construct
  source 1..30: mol_type = other DNA
ggtggcaacaaggtagcgaacgttgtaagc

SEQ ID NO: 1897 - DNA, 30 bp, synthetic construct
  source 1..30: mol_type = other DNA
ggtggcaacaaggtagcgaacgttgtacgt

SEQ ID NO: 1898 - DNA, 30 bp, synthetic construct
  source 1..30: mol_type = other DNA
ggtggcaacaaggtagcgaacgttgtactg

SEQ ID NO: 1899 - DNA, 30 bp, synthetic construct
  source 1..30: mol_type = other DNA
ggtggcaacaaggtagcgaacgttgtaccg

SEQ ID NO: 1900 - DNA, 30 bp, synthetic construct
  source 1..30: mol_type = other DNA
ggtggcaacaaggtagcgaacgttgtacat

SEQ ID NO: 1901 - DNA, 30 bp, synthetic construct
  source 1..30: mol_type = other DNA
ggtggcaacaaggtagcgaacgttgtacag

SEQ ID NO: 1902 - DNA, 30 bp, synthetic construct
  source 1..30: mol_type = other DNA
ggtggcaacaaggtagcgaacgttgtagtg

SEQ ID NO: 1903 - DNA, 30 bp, synthetic construct
  source 1..30: mol_type = other DNA
ggtggcaacaaggtagcgaacgttgtagcg

SEQ ID NO: 1904 - DNA, 30 bp, synthetic construct
  source 1..30: mol_type = other DNA
ggtggcaacaaggtagcgaacgttgtagat

SEQ ID NO: 1905 - DNA, 30 bp, synthetic construct
  source 1..30: mol_type = other DNA
ggtggcaacaaggtagcgaacgttgtagaa

SEQ ID NO: 1906 - DNA, 30 bp, synthetic construct
  source 1..30: mol_type = other DNA
ggtggcaacaaggtagcgaacgttgtaggc

SEQ ID NO: 1907 - DNA, 30 bp, synthetic construct
  source 1..30: mol_type = other DNA
ggtggcaacaaggtagcgaacgttgtattt

SEQ ID NO: 1908 - DNA, 30 bp, synthetic construct
  source 1..30: mol_type = other DNA
ggtggcaacaaggtagcgaacgttgtatat

SEQ ID NO: 1909 - DNA, 30 bp, synthetic construct
  source 1..30: mol_type = other DNA
ggtggcaacaaggtagcgaacgttgtatgc

SEQ ID NO: 1910 - DNA, 30 bp, synthetic construct
  source 1..30: mol_type = other DNA
ggtggcaacaaggtagcgaacgttgtatgg

SEQ ID NO: 1911 - DNA, 30 bp, Bacillus subtilis
  source 1..30: mol_type = genomic DNA
ctgggtggcgctaaccgtctgaccactggt

SEQ ID NO: 1912 - DNA, 30 bp, synthetic construct
  source 1..30: mol_type = other DNA
attggtggcgctaaccgtctgaccactggt

SEQ ID NO: 1913 - DNA, 30 bp, synthetic construct
  source 1..30: mol_type = other DNA
atgggtggcgctaaccgtctgaccactggt

SEQ ID NO: 1914 - DNA, 30 bp, synthetic construct
  source 1..30: mol_type = other DNA
accggtggcgctaaccgtctgaccactggt

SEQ ID NO: 1915 - DNA, 30 bp, synthetic construct
  source 1..30: mol_type = other DNA
aacggtggcgctaaccgtctgaccactggt

SEQ ID NO: 1916 - DNA, 30 bp, synthetic construct
  source 1..30: mol_type = other DNA
aaaggtggcgctaaccgtctgaccactggt

SEQ ID NO: 1917 - DNA, 30 bp, synthetic construct
  source 1..30: mol_type = other DNA
agcggtggcgctaaccgtctgaccactggt

SEQ ID NO: 1918 - DNA, 30 bp, synthetic construct
  source 1..30: mol_type = other DNA
cgtggtggcgctaaccgtctgaccactggt

SEQ ID NO: 1919 - DNA, 30 bp, synthetic construct
  source 1..30: mol_type = other DNA
ccgggtggcgctaaccgtctgaccactggt

SEQ ID NO: 1920 - DNA, 30 bp, synthetic construct
  source 1..30: mol_type = other DNA
catggtggcgctaaccgtctgaccactggt

SEQ ID NO: 1921 - DNA, 30 bp, synthetic construct
  source 1..30: mol_type = other DNA
cagggtggcgctaaccgtctgaccactggt

SEQ ID NO: 1922 - DNA, 30 bp, synthetic construct
  source 1..30: mol_type = other DNA
gtgggtggcgctaaccgtctgaccactggt

SEQ ID NO: 1923 - DNA, 30 bp, synthetic construct
  source 1..30: mol_type = other DNA
gcgggtggcgctaaccgtctgaccactggt

SEQ ID NO: 1924 - DNA, 30 bp, synthetic construct
  source 1..30: mol_type = other DNA
gatggtggcgctaaccgtctgaccactggt

SEQ ID NO: 1925 - DNA, 30 bp, synthetic construct
  source 1..30: mol_type = other DNA
gaaggtggcgctaaccgtctgaccactggt

SEQ ID NO: 1926 - DNA, 30 bp, synthetic construct
  source 1..30: mol_type = other DNA
ggcggtggcgctaaccgtctgaccactggt

SEQ ID NO: 1927 - DNA, 30 bp, synthetic construct
  source 1..30: mol_type = other DNA
tttggtggcgctaaccgtctgaccactggt

SEQ ID NO: 1928 - DNA, 30 bp, synthetic construct
  source 1..30: mol_type = other DNA
tatggtggcgctaaccgtctgaccactggt

SEQ ID NO: 1929 - DNA, 30 bp, synthetic construct
  source 1..30: mol_type = other DNA
tgcggtggcgctaaccgtctgaccactggt

SEQ ID NO: 1930 - DNA, 30 bp, synthetic construct
  source 1..30: mol_type = other DNA
tggggtggcgctaaccgtctgaccactggt

SEQ ID NO: 1931 - DNA, 30 bp, synthetic construct
  source 1..30: mol_type = other DNA
ctgattggcgctaaccgtctgaccactggt

SEQ ID NO: 1932 - DNA, 30 bp, synthetic construct
  source 1..30: mol_type = other DNA
ctgatgggcgctaaccgtctgaccactggt

SEQ ID NO: 1933 - DNA, 30 bp, synthetic construct
  source 1..30: mol_type = other DNA
ctgaccggcgctaaccgtctgaccactggt

SEQ ID NO: 1934 - DNA, 30 bp, synthetic construct
  source 1..30: mol_type = other DNA
ctgaacggcgctaaccgtctgaccactggt

SEQ ID NO: 1935 - DNA, 30 bp, synthetic construct
  source 1..30: mol_type = other DNA
ctgaaaggcgctaaccgtctgaccactggt

SEQ ID NO: 1936 - DNA, 30 bp, synthetic construct
  source 1..30: mol_type = other DNA
ctgagcggcgctaaccgtctgaccactggt

SEQ ID NO: 1937 - DNA, 30 bp, synthetic construct
  source 1..30: mol_type = other DNA
ctgcgtggcgctaaccgtctgaccactggt

SEQ ID NO: 1938 - DNA, 30 bp, synthetic construct
  source 1..30: mol_type = other DNA
ctgctgggcgctaaccgtctgaccactggt

SEQ ID NO: 1939 - DNA, 30 bp, synthetic construct
  source 1..30: mol_type = other DNA
ctgccgggcgctaaccgtctgaccactggt

SEQ ID NO: 1940 - DNA, 30 bp, synthetic construct
  source 1..30: mol_type = other DNA
ctgcatggcgctaaccgtctgaccactggt

SEQ ID NO: 1941 - DNA, 30 bp, synthetic construct
  source 1..30: mol_type = other DNA
ctgcagggcgctaaccgtctgaccactggt

SEQ ID NO: 1942 - DNA, 30 bp, synthetic construct
  source 1..30: mol_type = other DNA
ctggtgggcgctaaccgtctgaccactggt

SEQ ID NO: 1943 - DNA, 30 bp, synthetic construct
  source 1..30: mol_type = other DNA
ctggcgggcgctaaccgtctgaccactggt

SEQ ID NO: 1944 - DNA, 30 bp, synthetic construct
  source 1..30: mol_type = other DNA
ctggatggcgctaaccgtctgaccactggt

SEQ ID NO: 1945 - DNA, 30 bp, synthetic construct
  source 1..30: mol_type = other DNA
ctggaaggcgctaaccgtctgaccactggt

SEQ ID NO: 1946 - DNA, 30 bp, synthetic construct
  source 1..30: mol_type = other DNA
ctgtttggcgctaaccgtctgaccactggt

SEQ ID NO: 1947 - DNA, 30 bp, synthetic construct
  source 1..30: mol_type = other DNA
ctgtatggcgctaaccgtctgaccactggt

SEQ ID NO: 1948 - DNA, 30 bp, synthetic construct
  source 1..30: mol_type = other DNA
ctgtgcggcgctaaccgtctgaccactggt

SEQ ID NO: 1949 - DNA, 30 bp, synthetic construct
  source 1..30: mol_type = other DNA
ctgtggggcgctaaccgtctgaccactggt

SEQ ID NO: 1950 - DNA, 30 bp, synthetic construct
  source 1..30: mol_type = other DNA
ctgggtattgctaaccgtctgaccactggt

SEQ ID NO: 1951 - DNA, 30 bp, synthetic construct
  source 1..30: mol_type = other DNA
ctgggtatggctaaccgtctgaccactggt

SEQ ID NO: 1952 - DNA, 30 bp, synthetic construct
  source 1..30: mol_type = other DNA
ctgggtaccgctaaccgtctgaccactggt

SEQ ID NO: 1953 - DNA, 30 bp, synthetic construct
  source 1..30: mol_type = other DNA
ctgggtaacgctaaccgtctgaccactggt

SEQ ID NO: 1954 - DNA, 30 bp, synthetic construct
  source 1..30: mol_type = other DNA
ctgggtaaagctaaccgtctgaccactggt

SEQ ID NO: 1955 - DNA, 30 bp, synthetic construct
  source 1..30: mol_type = other DNA
ctgggtagcgctaaccgtctgaccactggt

SEQ ID NO: 1956 - DNA, 30 bp, synthetic construct
  source 1..30: mol_type = other DNA
ctgggtcgtgctaaccgtctgaccactggt

SEQ ID NO: 1957 - DNA, 30 bp, synthetic construct
  source 1..30: mol_type = other DNA
ctgggtctggctaaccgtctgaccactggt

SEQ ID NO: 1958 - DNA, 30 bp, synthetic construct
  source 1..30: mol_type = other DNA
ctgggtccggctaaccgtctgaccactggt

SEQ ID NO: 1959 - DNA, 30 bp, synthetic construct
  source 1..30: mol_type = other DNA
ctgggtcatgctaaccgtctgaccactggt

SEQ ID NO: 1960 - DNA, 30 bp, synthetic construct
  source 1..30: mol_type = other DNA
ctgggtcaggctaaccgtctgaccactggt

SEQ ID NO: 1961 - DNA, 30 bp, synthetic construct
  source 1..30: mol_type = other DNA
ctgggtgtggctaaccgtctgaccactggt

SEQ ID NO: 1962 - DNA, 30 bp, synthetic construct
  source 1..30: mol_type = other DNA
ctgggtgcggctaaccgtctgaccactggt

SEQ ID NO: 1963 - DNA, 30 bp, synthetic construct
  source 1..30: mol_type = other DNA
ctgggtgatgctaaccgtctgaccactggt

SEQ ID NO: 1964 - DNA, 30 bp, synthetic construct
  source 1..30: mol_type = other DNA
ctgggtgaagctaaccgtctgaccactggt

SEQ ID NO: 1965 - DNA, 30 bp, synthetic construct
  source 1..30: mol_type = other DNA
ctgggttttgctaaccgtctgaccactggt

SEQ ID NO: 1966 - DNA, 30 bp, synthetic construct
  source 1..30: mol_type = other DNA
ctgggttatgctaaccgtctgaccactggt

SEQ ID NO: 1967 - DNA, 30 bp, synthetic construct
  source 1..30: mol_type = other DNA
ctgggttgcgctaaccgtctgaccactggt

SEQ ID NO: 1968 - DNA, 30 bp, synthetic construct
  source 1..30: mol_type = other DNA
ctgggttgggctaaccgtctgaccactggt

SEQ ID NO: 1969 - DNA, 30 bp, synthetic construct
  source 1..30: mol_type = other DNA
ctgggtggcattaaccgtctgaccactggt

SEQ ID NO: 1970 - DNA, 30 bp, synthetic construct
  source 1..30: mol_type = other DNA
ctgggtggcatgaaccgtctgaccactggt

SEQ ID NO: 1971 - DNA, 30 bp, synthetic construct
  source 1..30: mol_type = other DNA
ctgggtggcaccaaccgtctgaccactggt

SEQ ID NO: 1972 - DNA, 30 bp, synthetic construct
  source 1..30: mol_type = other DNA
ctgggtggcaacaaccgtctgaccactggt

SEQ ID NO: 1973 - DNA, 30 bp, synthetic construct
  source 1..30: mol_type = other DNA
ctgggtggcaaaaaccgtctgaccactggt

SEQ ID NO: 1974 - DNA, 30 bp, synthetic construct
  source 1..30: mol_type = other DNA
ctgggtggcagcaaccgtctgaccactggt

SEQ ID NO: 1975 - DNA, 30 bp, synthetic construct
  source 1..30: mol_type = other DNA
ctgggtggccgtaaccgtctgaccactggt

SEQ ID NO: 1976 - DNA, 30 bp, synthetic construct
  source 1..30: mol_type = other DNA
ctgggtggcctgaaccgtctgaccactggt

SEQ ID NO: 1977 - DNA, 30 bp, synthetic construct
  source 1..30: mol_type = other DNA
ctgggtggcccgaaccgtctgaccactggt

SEQ ID NO: 1978 - DNA, 30 bp, synthetic construct
  source 1..30: mol_type = other DNA
ctgggtggccataaccgtctgaccactggt

SEQ ID NO: 1979 - DNA, 30 bp, synthetic construct
  source 1..30: mol_type = other DNA
ctgggtggccagaaccgtctgaccactggt

SEQ ID NO: 1980 - DNA, 30 bp, synthetic construct
  source 1..30: mol_type = other DNA
ctgggtggcgtgaaccgtctgaccactggt

SEQ ID NO: 1981 - DNA, 30 bp, synthetic construct
  source 1..30: mol_type = other DNA
ctgggtggcgataaccgtctgaccactggt

SEQ ID NO: 1982 - DNA, 30 bp, synthetic construct
  source 1..30: mol_type = other DNA
ctgggtggcgaaaaccgtctgaccactggt

SEQ ID NO: 1983 - DNA, 30 bp, synthetic construct
  source 1..30: mol_type = other DNA
ctgggtggcggcaaccgtctgaccactggt

SEQ ID NO: 1984 - DNA, 30 bp, synthetic construct
  source 1..30: mol_type = other DNA
ctgggtggctttaaccgtctgaccactggt

SEQ ID NO: 1985 - DNA, 30 bp, synthetic construct
  source 1..30: mol_type = other DNA
ctgggtggctataaccgtctgaccactggt

SEQ ID NO: 1986 - DNA, 30 bp, synthetic construct
  source 1..30: mol_type = other DNA
ctgggtggctgcaaccgtctgaccactggt

SEQ ID NO: 1987 - DNA, 30 bp, synthetic construct
  source 1..30: mol_type = other DNA
ctgggtggctggaaccgtctgaccactggt

SEQ ID NO: 1988 - DNA, 30 bp, synthetic construct
  source 1..30: mol_type = other DNA
ctgggtggcgctattcgtctgaccactggt

SEQ ID NO: 1989 - DNA, 30 bp, synthetic construct
  source 1..30: mol_type = other DNA
ctgggtggcgctatgcgtctgaccactggt

SEQ ID NO: 1990 - DNA, 30 bp, synthetic construct
  source 1..30: mol_type = other DNA
ctgggtggcgctacccgtctgaccactggt

SEQ ID NO: 1991 - DNA, 30 bp, synthetic construct
  source 1..30: mol_type = other DNA
ctgggtggcgctaaacgtctgaccactggt

SEQ ID NO: 1992 - DNA, 30 bp, synthetic construct
  source 1..30: mol_type = other DNA
ctgggtggcgctagccgtctgaccactggt

SEQ ID NO: 1993 - DNA, 30 bp, synthetic construct
  source 1..30: mol_type = other DNA
ctgggtggcgctcgtcgtctgaccactggt

SEQ ID NO: 1994 - DNA, 30 bp, synthetic construct
  source 1..30: mol_type = other DNA
ctgggtggcgctctgcgtctgaccactggt

SEQ ID NO: 1995 - DNA, 30 bp, synthetic construct
  source 1..30: mol_type = other DNA
ctgggtggcgctccgcgtctgaccactggt

SEQ ID NO: 1996 - DNA, 30 bp, synthetic construct
  source 1..30: mol_type = other DNA
ctgggtggcgctcatcgtctgaccactggt

SEQ ID NO: 1997 - DNA, 30 bp, synthetic construct
  source 1..30: mol_type = other DNA
ctgggtggcgctcagcgtctgaccactggt

SEQ ID NO: 1998 - DNA, 30 bp, synthetic construct
  source 1..30: mol_type = other DNA
ctgggtggcgctgtgcgtctgaccactggt

SEQ ID NO: 1999 - DNA, 30 bp, synthetic construct
  source 1..30: mol_type = other DNA
ctgggtggcgctgcgcgtctgaccactggt

SEQ ID NO: 2000 - DNA, 30 bp, synthetic construct
  source 1..30: mol_type = other DNA
ctgggtggcgctgatcgtctgaccactggt

SEQ ID NO: 2001 - DNA, 30 bp, synthetic construct
  source 1..30: mol_type = other DNA
ctgggtggcgctgaacgtctgaccactggt

SEQ ID NO: 2002 - DNA, 30 bp, synthetic construct
  source 1..30: mol_type = other DNA
ctgggtggcgctggccgtctgaccactggt

SEQ ID NO: 2003 - DNA, 30 bp, synthetic construct
  source 1..30: mol_type = other DNA
ctgggtggcgcttttcgtctgaccactggt

SEQ ID NO: 2004 - DNA, 30 bp, synthetic construct
  source 1..30: mol_type = other DNA
ctgggtggcgcttatcgtctgaccactggt

SEQ ID NO: 2005 - DNA, 30 bp, synthetic construct
  source 1..30: mol_type = other DNA
ctgggtggcgcttgccgtctgaccactggt

SEQ ID NO: 2006 - DNA, 30 bp, synthetic construct
  source 1..30: mol_type = other DNA
ctgggtggcgcttggcgtctgaccactggt

SEQ ID NO: 2007 - DNA, 30 bp, synthetic construct
  source 1..30: mol_type = other DNA
ctgggtggcgctaacattctgaccactggt

SEQ ID NO: 2008 - DNA, 30 bp, synthetic construct
  source 1..30: mol_type = other DNA
ctgggtggcgctaacatgctgaccactggt

SEQ ID NO: 2009 - DNA, 30 bp, synthetic construct
  source 1..30: mol_type = other DNA
ctgggtggcgctaacaccctgaccactggt

SEQ ID NO: 2010 - DNA, 30 bp, synthetic construct
  source 1..30: mol_type = other DNA
ctgggtggcgctaacaacctgaccactggt

SEQ ID NO: 2011 - DNA, 30 bp, synthetic construct
  source 1..30: mol_type = other DNA
ctgggtggcgctaacaaactgaccactggt

SEQ ID NO: 2012 - DNA, 30 bp, synthetic construct
  source 1..30: mol_type = other DNA
ctgggtggcgctaacagcctgaccactggt

SEQ ID NO: 2013 - DNA, 30 bp, synthetic construct
  source 1..30: mol_type = other DNA
ctgggtggcgctaacctgctgaccactggt

SEQ ID NO: 2014 - DNA, 30 bp, synthetic construct
  source 1..30: mol_type = other DNA
ctgggtggcgctaacccgctgaccactggt

SEQ ID NO: 2015 - DNA, 30 bp, synthetic construct
  source 1..30: mol_type = other DNA
ctgggtggcgctaaccatctgaccactggt

SEQ ID NO: 2016 - DNA, 30 bp, synthetic construct
  source 1..30: mol_type = other DNA
ctgggtggcgctaaccagctgaccactggt

SEQ ID NO: 2017 - DNA, 30 bp, synthetic construct
  source 1..30: mol_type = other DNA
ctgggtggcgctaacgtgctgaccactggt

SEQ ID NO: 2018 - DNA, 30 bp, synthetic construct
  source 1..30: mol_type = other DNA
ctgggtggcgctaacgcgctgaccactggt

SEQ ID NO: 2019 - DNA, 30 bp, synthetic construct
  source 1..30: mol_type = other DNA
ctgggtggcgctaacgatctgaccactggt

SEQ ID NO: 2020 - DNA, 30 bp, synthetic construct
  source 1..30: mol_type = other DNA
ctgggtggcgctaacgaactgaccactggt

SEQ ID NO: 2021 - DNA, 30 bp, synthetic construct
  source 1..30: mol_type = other DNA
ctgggtggcgctaacggcctgaccactggt

SEQ ID NO: 2022 - DNA, 30 bp, synthetic construct
  source 1..30: mol_type = other DNA
ctgggtggcgctaactttctgaccactggt

SEQ ID NO: 2023 - DNA, 30 bp, synthetic construct
  source 1..30: mol_type = other DNA
ctgggtggcgctaactatctgaccactggt

SEQ ID NO: 2024 - DNA, 30 bp, synthetic construct
  source 1..30: mol_type = other DNA
ctgggtggcgctaactgcctgaccactggt

SEQ ID NO: 2025 - DNA, 30 bp, synthetic construct
  source 1..30: mol_type = other DNA
ctgggtggcgctaactggctgaccactggt

SEQ ID NO: 2026 - DNA, 30 bp, synthetic construct
  source 1..30: mol_type = other DNA
ctgggtggcgctaaccgtattaccactggt

SEQ ID NO: 2027 - DNA, 30 bp, synthetic construct
  source 1..30: mol_type = other DNA
ctgggtggcgctaaccgtatgaccactggt

SEQ ID NO: 2028 - DNA, 30 bp, synthetic construct
  source 1..30: mol_type = other DNA
ctgggtggcgctaaccgtaccaccactggt

SEQ ID NO: 2029 - DNA, 30 bp, synthetic construct
  source 1..30: mol_type = other DNA
ctgggtggcgctaaccgtaacaccactggt

SEQ ID NO: 2030 - DNA, 30 bp, synthetic construct
  source 1..30: mol_type = other DNA
ctgggtggcgctaaccgtaaaaccactggt

SEQ ID NO: 2031 - DNA, 30 bp, synthetic construct
  source 1..30: mol_type = other DNA
ctgggtggcgctaaccgtagcaccactggt

SEQ ID NO: 2032 - DNA, 30 bp, synthetic construct
  source 1..30: mol_type = other DNA
ctgggtggcgctaaccgtcgtaccactggt

SEQ ID NO: 2033 - DNA, 30 bp, synthetic construct
  source 1..30: mol_type = other DNA
ctgggtggcgctaaccgtccgaccactggt

SEQ ID NO: 2034 - DNA, 30 bp, synthetic construct
  source 1..30: mol_type = other DNA
ctgggtggcgctaaccgtcataccactggt

SEQ ID NO: 2035 - DNA, 30 bp, synthetic construct
  source 1..30: mol_type = other DNA
ctgggtggcgctaaccgtcagaccactggt

SEQ ID NO: 2036 - DNA, 30 bp, synthetic construct
  source 1..30: mol_type = other DNA
ctgggtggcgctaaccgtgtgaccactggt

SEQ ID NO: 2037 - DNA, 30 bp, synthetic construct
  source 1..30: mol_type = other DNA
ctgggtggcgctaaccgtgcgaccactggt

SEQ ID NO: 2038 - DNA, 30 bp, synthetic construct
  source 1..30: mol_type = other DNA
ctgggtggcgctaaccgtgataccactggt

SEQ ID NO: 2039 - DNA, 30 bp, synthetic construct
  source 1..30: mol_type = other DNA
ctgggtggcgctaaccgtgaaaccactggt

SEQ ID NO: 2040 - DNA, 30 bp, synthetic construct
  source 1..30: mol_type = other DNA
ctgggtggcgctaaccgtggcaccactggt

SEQ ID NO: 2041 - DNA, 30 bp, synthetic construct
  source 1..30: mol_type = other DNA
ctgggtggcgctaaccgttttaccactggt

SEQ ID NO: 2042 - DNA, 30 bp, synthetic construct
  source 1..30: mol_type = other DNA
ctgggtggcgctaaccgttataccactggt

SEQ ID NO: 2043 - DNA, 30 bp, synthetic construct
  source 1..30: mol_type = other DNA
ctgggtggcgctaaccgttgcaccactggt

SEQ ID NO: 2044 - DNA, 30 bp, synthetic construct
  source 1..30: mol_type = other DNA
ctgggtggcgctaaccgttggaccactggt

SEQ ID NO: 2045 - DNA, 30 bp, synthetic construct
  source 1..30: mol_type = other DNA
ctgggtggcgctaaccgtctgattactggt

SEQ ID NO: 2046 - DNA, 30 bp, synthetic construct
  source 1..30: mol_type = other DNA
ctgggtggcgctaaccgtctgatgactggt

SEQ ID NO: 2047 - DNA, 30 bp, synthetic construct
  source 1..30: mol_type = other DNA
ctgggtggcgctaaccgtctgaacactggt

SEQ ID NO: 2048 - DNA, 30 bp, synthetic construct
  source 1..30: mol_type = other DNA
ctgggtggcgctaaccgtctgaaaactggt

SEQ ID NO: 2049 - DNA, 30 bp, synthetic construct
  source 1..30: mol_type = other DNA
ctgggtggcgctaaccgtctgagcactggt

SEQ ID NO: 2050 - DNA, 30 bp, synthetic construct
  source 1..30: mol_type = other DNA
ctgggtggcgctaaccgtctgcgtactggt

SEQ ID NO: 2051 - DNA, 30 bp, synthetic construct
  source 1..30: mol_type = other DNA
ctgggtggcgctaaccgtctgctgactggt

SEQ ID NO: 2052 - DNA, 30 bp, synthetic construct
  source 1..30: mol_type = other DNA
ctgggtggcgctaaccgtctgccgactggt

SEQ ID NO: 2053 - DNA, 30 bp, synthetic construct
  source 1..30: mol_type = other DNA
ctgggtggcgctaaccgtctgcatactggt

SEQ ID NO: 2054 - DNA, 30 bp, synthetic construct
  source 1..30: mol_type = other DNA
ctgggtggcgctaaccgtctgcagactggt

SEQ ID NO: 2055 - DNA, 30 bp, synthetic construct
  source 1..30: mol_type = other DNA
ctgggtggcgctaaccgtctggtgactggt

SEQ ID NO: 2056 - DNA, 30 bp, synthetic construct
  source 1..30: mol_type = other DNA
ctgggtggcgctaaccgtctggcgactggt

SEQ ID NO: 2057 - DNA, 30 bp, synthetic construct
  source 1..30: mol_type = other DNA
ctgggtggcgctaaccgtctggatactggt

SEQ ID NO: 2058 - DNA, 30 bp, synthetic construct
  source 1..30: mol_type = other DNA
ctgggtggcgctaaccgtctggaaactggt

SEQ ID NO: 2059 - DNA, 30 bp, synthetic construct
  source 1..30: mol_type = other DNA
ctgggtggcgctaaccgtctgggcactggt

SEQ ID NO: 2060 - DNA, 30 bp, synthetic construct
  source 1..30: mol_type = other DNA
ctgggtggcgctaaccgtctgtttactggt

SEQ ID NO: 2061 - DNA, 30 bp, synthetic construct
  source 1..30: mol_type = other DNA
ctgggtggcgctaaccgtctgtatactggt

SEQ ID NO: 2062 - DNA, 30 bp, synthetic construct
  source 1..30: mol_type = other DNA
ctgggtggcgctaaccgtctgtgcactggt

SEQ ID NO: 2063 - DNA, 30 bp, synthetic construct
  source 1..30: mol_type = other DNA
ctgggtggcgctaaccgtctgtggactggt

SEQ ID NO: 2064 - DNA, 30 bp, synthetic construct
  source 1..30: mol_type = other DNA
ctgggtggcgctaaccgtctgaccattggt

SEQ ID NO: 2065 - DNA, 30 bp, synthetic construct
  source 1..30: mol_type = other DNA
ctgggtggcgctaaccgtctgaccatgggt

SEQ ID NO: 2066 - DNA, 30 bp, synthetic construct
  source 1..30: mol_type = other DNA
ctgggtggcgctaaccgtctgaccaacggt

SEQ ID NO: 2067 - DNA, 30 bp, synthetic construct
  source 1..30: mol_type = other DNA
ctgggtggcgctaaccgtctgaccaaaggt

SEQ ID NO: 2068 - DNA, 30 bp, synthetic construct
  source 1..30: mol_type = other DNA
ctgggtggcgctaaccgtctgaccagcggt

SEQ ID NO: 2069 - DNA, 30 bp, synthetic construct
  source 1..30: mol_type = other DNA
ctgggtggcgctaaccgtctgacccgtggt

SEQ ID NO: 2070 - DNA, 30 bp, synthetic construct
  source 1..30: mol_type = other DNA
ctgggtggcgctaaccgtctgaccctgggt

SEQ ID NO: 2071 - DNA, 30 bp, synthetic construct
  source 1..30: mol_type = other DNA
ctgggtggcgctaaccgtctgaccccgggt

SEQ ID NO: 2072 - DNA, 30 bp, synthetic construct
  source 1..30: mol_type = other DNA
ctgggtggcgctaaccgtctgacccatggt

SEQ ID NO: 2073 - DNA, 30 bp, synthetic construct
  source 1..30: mol_type = other DNA
ctgggtggcgctaaccgtctgacccagggt

SEQ ID NO: 2074 - DNA, 30 bp, synthetic construct
  source 1..30: mol_type = other DNA
ctgggtggcgctaaccgtctgaccgtgggt

SEQ ID NO: 2075 - DNA, 30 bp, synthetic construct
  source 1..30: mol_type = other DNA
ctgggtggcgctaaccgtctgaccgcgggt

SEQ ID NO: 2076 - DNA, 30 bp, synthetic construct
  source 1..30: mol_type = other DNA
ctgggtggcgctaaccgtctgaccgatggt

SEQ ID NO: 2077 - DNA, 30 bp, synthetic construct
  source 1..30: mol_type = other DNA
ctgggtggcgctaaccgtctgaccgaaggt

SEQ ID NO: 2078 - DNA, 30 bp, synthetic construct
  source 1..30: mol_type = other DNA
ctgggtggcgctaaccgtctgaccggcggt

SEQ ID NO: 2079 - DNA, 30 bp, synthetic construct
  source 1..30: mol_type = other DNA
ctgggtggcgctaaccgtctgacctttggt

SEQ ID NO: 2080 - DNA, 30 bp, synthetic construct
  source 1..30: mol_type = other DNA
ctgggtggcgctaaccgtctgacctatggt

SEQ ID NO: 2081 - DNA, 30 bp, synthetic construct
  source 1..30: mol_type = other DNA
ctgggtggcgctaaccgtctgacctgcggt

SEQ ID NO: 2082 - DNA, 30 bp, synthetic construct
  source 1..30: mol_type = other DNA
ctgggtggcgctaaccgtctgacctggggt

SEQ ID NO: 2083 - DNA, 30 bp, synthetic construct
  source 1..30: mol_type = other DNA
ctgggtggcgctaaccgtctgaccactatt

SEQ ID NO: 2084 - DNA, 30 bp, synthetic construct
  source 1..30: mol_type = other DNA
ctgggtggcgctaaccgtctgaccactatg

SEQ ID NO: 2085 - DNA, 30 bp, synthetic construct
  source 1..30: mol_type = other DNA
ctgggtggcgctaaccgtctgaccactacc

SEQ ID NO: 2086 - DNA, 30 bp, synthetic construct
  source 1..30: mol_type = other DNA
ctgggtggcgctaaccgtctgaccactaac

SEQ ID NO: 2087 - DNA, 30 bp, synthetic construct
  source 1..30: mol_type = other DNA
ctgggtggcgctaaccgtctgaccactaaa

SEQ ID NO: 2088 - DNA, 30 bp, synthetic construct
  source 1..30: mol_type = other DNA
ctgggtggcgctaaccgtctgaccactagc

SEQ ID NO: 2089 - DNA, 30 bp, synthetic construct
  source 1..30: mol_type = other DNA
ctgggtggcgctaaccgtctgaccactcgt

SEQ ID NO: 2090 - DNA, 30 bp, synthetic construct
  source 1..30: mol_type = other DNA
ctgggtggcgctaaccgtctgaccactctg

SEQ ID NO: 2091 - DNA, 30 bp, synthetic construct
  source 1..30: mol_type = other DNA
ctgggtggcgctaaccgtctgaccactccg

SEQ ID NO: 2092 - DNA, 30 bp, synthetic construct
  source 1..30: mol_type = other DNA
ctgggtggcgctaaccgtctgaccactcat

SEQ ID NO: 2093 - DNA, 30 bp, synthetic construct
  source 1..30: mol_type = other DNA
ctgggtggcgctaaccgtctgaccactcag

SEQ ID NO: 2094 - DNA, 30 bp, synthetic construct
  source 1..30: mol_type = other DNA
ctgggtggcgctaaccgtctgaccactgtg

SEQ ID NO: 2095 - DNA, 30 bp, synthetic construct
  source 1..30: mol_type = other DNA
ctgggtggcgctaaccgtctgaccactgcg

SEQ ID NO: 2096 - DNA, 30 bp, synthetic construct
  source 1..30: mol_type = other DNA
ctgggtggcgctaaccgtctgaccactgat

SEQ ID NO: 2097 - DNA, 30 bp, synthetic construct
  source 1..30: mol_type = other DNA
ctgggtggcgctaaccgtctgaccactgaa

SEQ ID NO: 2098 - DNA, 30 bp, synthetic construct
  source 1..30: mol_type = other DNA
ctgggtggcgctaaccgtctgaccactttt

SEQ ID NO: 2099 - DNA, 30 bp, synthetic construct
  source 1..30: mol_type = other DNA
ctgggtggcgctaaccgtctgaccacttat

SEQ ID NO: 2100 - DNA, 30 bp, synthetic construct
  source 1..30: mol_type = other DNA
ctgggtggcgctaaccgtctgaccacttgc

SEQ ID NO: 2101 - DNA, 30 bp, synthetic construct
  source 1..30: mol_type = other DNA
ctgggtggcgctaaccgtctgaccacttgg

SEQ ID NO: 2102 - DNA, 30 bp, Bacillus subtilis
  source 1..30: mol_type = genomic DNA
aaagcgctgccgggcacggacccgaaccaa

SEQ ID NO: 2103 - DNA, 30 bp, synthetic construct
  source 1..30: mol_type = other DNA
attgcgctgccgggcacggacccgaaccaa

SEQ ID NO: 2104 - DNA, 30 bp, synthetic construct
  source 1..30: mol_type = other DNA
atggcgctgccgggcacggacccgaaccaa

SEQ ID NO: 2105 - DNA, 30 bp, synthetic construct
  source 1..30: mol_type = other DNA
accgcgctgccgggcacggacccgaaccaa

SEQ ID NO: 2106 - DNA, 30 bp, synthetic construct
  source 1..30: mol_type = other DNA
aacgcgctgccgggcacggacccgaaccaa

SEQ ID NO: 2107 - DNA, 30 bp, synthetic construct
  source 1..30: mol_type = other DNA
agcgcgctgccgggcacggacccgaaccaa

SEQ ID NO: 2108 - DNA, 30 bp, synthetic construct
  source 1..30: mol_type = other DNA
cgtgcgctgccgggcacggacccgaaccaa

SEQ ID NO: 2109 - DNA, 30 bp, synthetic construct
  source 1..30: mol_type = other DNA
ctggcgctgccgggcacggacccgaaccaa

SEQ ID NO: 2110 - DNA, 30 bp, synthetic construct
  source 1..30: mol_type = other DNA
ccggcgctgccgggcacggacccgaaccaa

SEQ ID NO: 2111 - DNA, 30 bp, synthetic construct
  source 1..30: mol_type = other DNA
catgcgctgccgggcacggacccgaaccaa

SEQ ID NO: 2112 - DNA, 30 bp, synthetic construct
  source 1..30: mol_type = other DNA
caggcgctgccgggcacggacccgaaccaa

SEQ ID NO: 2113 - DNA, 30 bp, synthetic construct
  source 1..30: mol_type = other DNA
gtggcgctgccgggcacggacccgaaccaa

SEQ ID NO: 2114 - DNA, 30 bp, synthetic construct
  source 1..30: mol_type = other DNA
gcggcgctgccgggcacggacccgaaccaa

SEQ ID NO: 2115 - DNA, 30 bp, synthetic construct
  source 1..30: mol_type = other DNA
gatgcgctgccgggcacggacccgaaccaa

SEQ ID NO: 2116 - DNA, 30 bp, synthetic construct
  source 1..30: mol_type = other DNA
gaagcgctgccgggcacggacccgaaccaa

SEQ ID NO: 2117 - DNA, 30 bp, synthetic construct
  source 1..30: mol_type = other DNA
ggcgcgctgccgggcacggacccgaaccaa

SEQ ID NO: 2118 - DNA, 30 bp, synthetic construct
  source 1..30: mol_type = other DNA
tttgcgctgccgggcacggacccgaaccaa

SEQ ID NO: 2119 - DNA, 30 bp, synthetic construct
  source 1..30: mol_type = other DNA
tatgcgctgccgggcacggacccgaaccaa

SEQ ID NO: 2120 - DNA, 30 bp, synthetic construct
  source 1..30: mol_type = other DNA
tgcgcgctgccgggcacggacccgaaccaa

SEQ ID NO: 2121 - DNA, 30 bp, synthetic construct
  source 1..30: mol_type = other DNA
tgggcgctgccgggcacggacccgaaccaa

SEQ ID NO: 2122 - DNA, 30 bp, synthetic construct
  source 1..30: mol_type = other DNA
aaaattctgccgggcacggacccgaaccaa

SEQ ID NO: 2123 - DNA, 30 bp, synthetic construct
  source 1..30: mol_type = other DNA
aaaatgctgccgggcacggacccgaaccaa

SEQ ID NO: 2124 - DNA, 30 bp, synthetic construct
  source 1..30: mol_type = other DNA
aaaaccctgccgggcacggacccgaaccaa

SEQ ID NO: 2125 - DNA, 30 bp, synthetic construct
  source 1..30: mol_type = other DNA
aaaaacctgccgggcacggacccgaaccaa

SEQ ID NO: 2126 - DNA, 30 bp, synthetic construct
  source 1..30: mol_type = other DNA
aaaaaactgccgggcacggacccgaaccaa

SEQ ID NO: 2127 - DNA, 30 bp, synthetic construct
  source 1..30: mol_type = other DNA
aaaagcctgccgggcacggacccgaaccaa

SEQ ID NO: 2128 - DNA, 30 bp, synthetic construct
  source 1..30: mol_type = other DNA
aaacgtctgccgggcacggacccgaaccaa

SEQ ID NO: 2129 - DNA, 30 bp, synthetic construct
  source 1..30: mol_type = other DNA
aaactgctgccgggcacggacccgaaccaa

SEQ ID NO: 2130 - DNA, 30 bp, synthetic construct
  source 1..30: mol_type = other DNA
aaaccgctgccgggcacggacccgaaccaa

SEQ ID NO: 2131 - DNA, 30 bp, synthetic construct
  source 1..30: mol_type = other DNA
aaacatctgccgggcacggacccgaaccaa

SEQ ID NO: 2132 - DNA, 30 bp, synthetic construct
  source 1..30: mol_type = other DNA
aaacagctgccgggcacggacccgaaccaa

SEQ ID NO: 2133 - DNA, 30 bp, synthetic construct
  source 1..30: mol_type = other DNA
aaagtgctgccgggcacggacccgaaccaa

SEQ ID NO: 2134 - DNA, 30 bp, synthetic construct
  source 1..30: mol_type = other DNA
aaagatctgccgggcacggacccgaaccaa

SEQ ID NO: 2135 - DNA, 30 bp, synthetic construct
  source 1..30: mol_type = other DNA
aaagaactgccgggcacggacccgaaccaa

SEQ ID NO: 2136 - DNA, 30 bp, synthetic construct
  source 1..30: mol_type = other DNA
aaaggcctgccgggcacggacccgaaccaa

SEQ ID NO: 2137 - DNA, 30 bp, synthetic construct
  source 1..30: mol_type = other DNA
aaatttctgccgggcacggacccgaaccaa

SEQ ID NO: 2138 - DNA, 30 bp, synthetic construct
  source 1..30: mol_type = other DNA
aaatatctgccgggcacggacccgaaccaa

SEQ ID NO: 2139 - DNA, 30 bp, synthetic construct
  source 1..30: mol_type = other DNA
aaatgcctgccgggcacggacccgaaccaa

SEQ ID NO: 2140 - DNA, 30 bp, synthetic construct
  source 1..30: mol_type = other DNA
aaatggctgccgggcacggacccgaaccaa

SEQ ID NO: 2141 - DNA, 30 bp, synthetic construct
  source 1..30: mol_type = other DNA
aaagcgattccgggcacggacccgaaccaa

SEQ ID NO: 2142 - DNA, 30 bp, synthetic construct
  source 1..30: mol_type = other DNA
aaagcgatgccgggcacggacccgaaccaa

SEQ ID NO: 2143 - DNA, 30 bp, synthetic construct
  source 1..30: mol_type = other DNA
aaagcgaccccgggcacggacccgaaccaa

SEQ ID NO: 2144 - DNA, 30 bp, synthetic construct
  source 1..30: mol_type = other DNA
aaagcgaacccgggcacggacccgaaccaa

SEQ ID NO: 2145 - DNA, 30 bp, synthetic construct
  source 1..30: mol_type = other DNA
aaagcgaaaccgggcacggacccgaaccaa

SEQ ID NO: 2146 - DNA, 30 bp, synthetic construct
  source 1..30: mol_type = other DNA
aaagcgagcccgggcacggacccgaaccaa

SEQ ID NO: 2147 - DNA, 30 bp, synthetic construct
  source 1..30: mol_type = other DNA
aaagcgcgtccgggcacggacccgaaccaa

SEQ ID NO: 2148 - DNA, 30 bp, synthetic construct
  source 1..30: mol_type = other DNA
aaagcgccgccgggcacggacccgaaccaa

SEQ ID NO: 2149 - DNA, 30 bp, synthetic construct
  source 1..30: mol_type = other DNA
aaagcgcatccgggcacggacccgaaccaa

SEQ ID NO: 2150 - DNA, 30 bp, synthetic construct
  source 1..30: mol_type = other DNA
aaagcgcagccgggcacggacccgaaccaa

SEQ ID NO: 2151 - DNA, 30 bp, synthetic construct
  source 1..30: mol_type = other DNA
aaagcggtgccgggcacggacccgaaccaa

SEQ ID NO: 2152 - DNA, 30 bp, synthetic construct
  source 1..30: mol_type = other DNA
aaagcggcgccgggcacggacccgaaccaa

SEQ ID NO: 2153 - DNA, 30 bp, synthetic construct
  source 1..30: mol_type = other DNA
aaagcggatccgggcacggacccgaaccaa

SEQ ID NO: 2154 - DNA, 30 bp, synthetic construct
  source 1..30: mol_type = other DNA
aaagcggaaccgggcacggacccgaaccaa

SEQ ID NO: 2155 - DNA, 30 bp, synthetic construct
  source 1..30: mol_type = other DNA
aaagcgggcccgggcacggacccgaaccaa

SEQ ID NO: 2156 - DNA, 30 bp, synthetic construct
  source 1..30: mol_type = other DNA
aaagcgtttccgggcacggacccgaaccaa

SEQ ID NO: 2157 - DNA, 30 bp, synthetic construct
  source 1..30: mol_type = other DNA
aaagcgtatccgggcacggacccgaaccaa

SEQ ID NO: 2158 - DNA, 30 bp, synthetic construct
  source 1..30: mol_type = other DNA
aaagcgtgcccgggcacggacccgaaccaa

SEQ ID NO: 2159 - DNA, 30 bp, synthetic construct
  source 1..30: mol_type = other DNA
aaagcgtggccgggcacggacccgaaccaa

SEQ ID NO: 2160 - DNA, 30 bp, synthetic construct
  source 1..30: mol_type = other DNA
aaagcgctgattggcacggacccgaaccaa

SEQ ID NO: 2161 - DNA, 30 bp, synthetic construct
  source 1..30: mol_type = other DNA
aaagcgctgatgggcacggacccgaaccaa

SEQ ID NO: 2162 - DNA, 30 bp, synthetic construct
  source 1..30: mol_type = other DNA
aaagcgctgaccggcacggacccgaaccaa

SEQ ID NO: 2163 - DNA, 30 bp, synthetic construct
  source 1..30: mol_type = other DNA
aaagcgctgaacggcacggacccgaaccaa

SEQ ID NO: 2164 - DNA, 30 bp, synthetic construct
  source 1..30: mol_type = other DNA
aaagcgctgaaaggcacggacccgaaccaa

SEQ ID NO: 2165 - DNA, 30 bp, synthetic construct
  source 1..30: mol_type = other DNA
aaagcgctgagcggcacggacccgaaccaa

SEQ ID NO: 2166 - DNA, 30 bp, synthetic construct
  source 1..30: mol_type = other DNA
aaagcgctgcgtggcacggacccgaaccaa

SEQ ID NO: 2167 - DNA, 30 bp, synthetic construct
  source 1..30: mol_type = other DNA
aaagcgctgctgggcacggacccgaaccaa

SEQ ID NO: 2168 - DNA, 30 bp, synthetic construct
  source 1..30: mol_type = other DNA
aaagcgctgcatggcacggacccgaaccaa

SEQ ID NO: 2169 - DNA, 30 bp, synthetic construct
  source 1..30: mol_type = other DNA
aaagcgctgcagggcacggacccgaaccaa

SEQ ID NO: 2170 - DNA, 30 bp, synthetic construct
  source 1..30: mol_type = other DNA
aaagcgctggtgggcacggacccgaaccaa

SEQ ID NO: 2171 - DNA, 30 bp, synthetic construct
  source 1..30: mol_type = other DNA
aaagcgctggcgggcacggacccgaaccaa

SEQ ID NO: 2172 - DNA, 30 bp, synthetic construct
  source 1..30: mol_type = other DNA
aaagcgctggatggcacggacccgaaccaa

SEQ ID NO: 2173 - DNA, 30 bp, synthetic construct
  source 1..30: mol_type = other DNA
aaagcgctggaaggcacggacccgaaccaa

SEQ ID NO: 2174 - DNA, 30 bp, synthetic construct
  source 1..30: mol_type = other DNA
aaagcgctgggcggcacggacccgaaccaa

SEQ ID NO: 2175 - DNA, 30 bp, synthetic construct
  source 1..30: mol_type = other DNA
aaagcgctgtttggcacggacccgaaccaa

SEQ ID NO: 2176 - DNA, 30 bp, synthetic construct
  source 1..30: mol_type = other DNA
aaagcgctgtatggcacggacccgaaccaa

SEQ ID NO: 2177 - DNA, 30 bp, synthetic construct
  source 1..30: mol_type = other DNA
aaagcgctgtgcggcacggacccgaaccaa

SEQ ID NO: 2178 - DNA, 30 bp, synthetic construct
  source 1..30: mol_type = other DNA
aaagcgctgtggggcacggacccgaaccaa

SEQ ID NO: 2179 - DNA, 30 bp, synthetic construct
  source 1..30: mol_type = other DNA
aaagcgctgccgattacggacccgaaccaa

SEQ ID NO: 2180 - DNA, 30 bp, synthetic construct
  source 1..30: mol_type = other DNA
aaagcgctgccgatgacggacccgaaccaa

SEQ ID NO: 2181 - DNA, 30 bp, synthetic construct
  source 1..30: mol_type = other DNA
aaagcgctgccgaccacggacccgaaccaa

SEQ ID NO: 2182 - DNA, 30 bp, synthetic construct
  source 1..30: mol_type = other DNA
aaagcgctgccgaacacggacccgaaccaa

SEQ ID NO: 2183 - DNA, 30 bp, synthetic construct
  source 1..30: mol_type = other DNA
aaagcgctgccgaaaacggacccgaaccaa

SEQ ID NO: 2184 - DNA, 30 bp, synthetic construct
  source 1..30: mol_type = other DNA
aaagcgctgccgagcacggacccgaaccaa

SEQ ID NO: 2185 - DNA, 30 bp, synthetic construct
  source 1..30: mol_type = other DNA
aaagcgctgccgcgtacggacccgaaccaa

SEQ ID NO: 2186 - DNA, 30 bp, synthetic construct
  source 1..30: mol_type = other DNA
aaagcgctgccgctgacggacccgaaccaa

SEQ ID NO: 2187 - DNA, 30 bp, synthetic construct
  source 1..30: mol_type = other DNA
aaagcgctgccgccgacggacccgaaccaa

SEQ ID NO: 2188 - DNA, 30 bp, synthetic construct
  source 1..30: mol_type = other DNA
aaagcgctgccgcatacggacccgaaccaa

SEQ ID NO: 2189 - DNA, 30 bp, synthetic construct
  source 1..30: mol_type = other DNA
aaagcgctgccgcagacggacccgaaccaa

SEQ ID NO: 2190 - DNA, 30 bp, synthetic construct
  source 1..30: mol_type = other DNA
aaagcgctgccggtgacggacccgaaccaa

SEQ ID NO: 2191 - DNA, 30 bp, synthetic construct
  source 1..30: mol_type = other DNA
aaagcgctgccggcgacggacccgaaccaa

SEQ ID NO: 2192 - DNA, 30 bp, synthetic construct
  source 1..30: mol_type = other DNA
aaagcgctgccggatacggacccgaaccaa

SEQ ID NO: 2193 - DNA, 30 bp, synthetic construct
  source 1..30: mol_type = other DNA
aaagcgctgccggaaacggacccgaaccaa

SEQ ID NO: 2194 - DNA, 30 bp, synthetic construct
  source 1..30: mol_type = other DNA
aaagcgctgccgtttacggacccgaaccaa

SEQ ID NO: 2195 - DNA, 30 bp, synthetic construct
  source 1..30: mol_type = other DNA
aaagcgctgccgtatacggacccgaaccaa

SEQ ID NO: 2196 - DNA, 30 bp, synthetic construct
  source 1..30: mol_type = other DNA
aaagcgctgccgtgcacggacccgaaccaa

SEQ ID NO: 2197 - DNA, 30 bp, synthetic construct
  source 1..30: mol_type = other DNA
aaagcgctgccgtggacggacccgaaccaa

SEQ ID NO: 2198 - DNA, 30 bp, synthetic construct
  source 1..30: mol_type = other DNA
aaagcgctgccgggcattgacccgaaccaa

SEQ ID NO: 2199 - DNA, 30 bp, synthetic construct
  source 1..30: mol_type = other DNA
aaagcgctgccgggcatggacccgaaccaa

SEQ ID NO: 2200 - DNA, 30 bp, synthetic construct
  source 1..30: mol_type = other DNA
aaagcgctgccgggcaacgacccgaaccaa

SEQ ID NO: 2201 - DNA, 30 bp, synthetic construct
  source 1..30: mol_type = other DNA
aaagcgctgccgggcaaagacccgaaccaa

SEQ ID NO: 2202 - DNA, 30 bp, synthetic construct
  source 1..30: mol_type = other DNA
aaagcgctgccgggcagcgacccgaaccaa

SEQ ID NO: 2203 - DNA, 30 bp, synthetic construct
  source 1..30: mol_type = other DNA
aaagcgctgccgggccgtgacccgaaccaa

SEQ ID NO: 2204 - DNA, 30 bp, synthetic construct
  source 1..30: mol_type = other DNA
aaagcgctgccgggcctggacccgaaccaa

SEQ ID NO: 2205 - DNA, 30 bp, synthetic construct
  source 1..30: mol_type = other DNA
aaagcgctgccgggcccggacccgaaccaa

SEQ ID NO: 2206 - DNA, 30 bp, synthetic construct
  source 1..30: mol_type = other DNA
aaagcgctgccgggccatgacccgaaccaa

SEQ ID NO: 2207 - DNA, 30 bp, synthetic construct
  source 1..30: mol_type = other DNA
aaagcgctgccgggccaggacccgaaccaa

SEQ ID NO: 2208 - DNA, 30 bp, synthetic construct
  source 1..30: mol_type = other DNA
aaagcgctgccgggcgtggacccgaaccaa

SEQ ID NO: 2209 - DNA, 30 bp, synthetic construct
  source 1..30: mol_type = other DNA
aaagcgctgccgggcgcggacccgaaccaa

SEQ ID NO: 2210 - DNA, 30 bp, synthetic construct
  source 1..30: mol_type = other DNA
aaagcgctgccgggcgatgacccgaaccaa

SEQ ID NO: 2211 - DNA, 30 bp, synthetic construct
  source 1..30: mol_type = other DNA
aaagcgctgccgggcgaagacccgaaccaa

SEQ ID NO: 2212 - DNA, 30 bp, synthetic construct
  source 1..30: mol_type = other DNA
aaagcgctgccgggcggcgacccgaaccaa

SEQ ID NO: 2213 - DNA, 30 bp, synthetic construct
  source 1..30: mol_type = other DNA
aaagcgctgccgggctttgacccgaaccaa

SEQ ID NO: 2214 - DNA, 30 bp, synthetic construct
  source 1..30: mol_type = other DNA
aaagcgctgccgggctatgacccgaaccaa

SEQ ID NO: 2215 - DNA, 30 bp, synthetic construct
  source 1..30: mol_type = other DNA
aaagcgctgccgggctgcgacccgaaccaa

SEQ ID NO: 2216 - DNA, 30 bp, synthetic construct
  source 1..30: mol_type = other DNA
aaagcgctgccgggctgggacccgaaccaa

SEQ ID NO: 2217 - DNA, 30 bp, synthetic construct
  source 1..30: mol_type = other DNA
aaagcgctgccgggcacgattccgaaccaa

SEQ ID NO: 2218 - DNA, 30 bp, synthetic construct
  source 1..30: mol_type = other DNA
aaagcgctgccgggcacgatgccgaaccaa

SEQ ID NO: 2219 - DNA, 30 bp, synthetic construct
  source 1..30: mol_type = other DNA
aaagcgctgccgggcacgaccccgaaccaa

SEQ ID NO: 2220 - DNA, 30 bp, synthetic construct
  source 1..30: mol_type = other DNA
aaagcgctgccgggcacgaacccgaaccaa

SEQ ID NO: 2221 - DNA, 30 bp, synthetic construct
  source 1..30: mol_type = other DNA
aaagcgctgccgggcacgaaaccgaaccaa

SEQ ID NO: 2222 - DNA, 30 bp, synthetic construct
  source 1..30: mol_type = other DNA
aaagcgctgccgggcacgagcccgaaccaa

SEQ ID NO: 2223 - DNA, 30 bp, synthetic construct
  source 1..30: mol_type = other DNA
aaagcgctgccgggcacgcgtccgaaccaa

SEQ ID NO: 2224 - DNA, 30 bp, synthetic construct
  source 1..30: mol_type = other DNA
aaagcgctgccgggcacgctgccgaaccaa

SEQ ID NO: 2225 - DNA, 30 bp, synthetic construct
  source 1..30: mol_type = other DNA
aaagcgctgccgggcacgccgccgaaccaa

SEQ ID NO: 2226 - DNA, 30 bp, synthetic construct
  source 1..30: mol_type = other DNA
aaagcgctgccgggcacgcatccgaaccaa

SEQ ID NO: 2227 - DNA, 30 bp, synthetic construct
  source 1..30: mol_type = other DNA
aaagcgctgccgggcacgcagccgaaccaa

SEQ ID NO: 2228 - DNA, 30 bp, synthetic construct
  source 1..30: mol_type = other DNA
aaagcgctgccgggcacggtgccgaaccaa

SEQ ID NO: 2229 - DNA, 30 bp, synthetic construct
  source 1..30: mol_type = other DNA
aaagcgctgccgggcacggcgccgaaccaa

SEQ ID NO: 2230 - DNA, 30 bp, synthetic construct
  source 1..30: mol_type = other DNA
aaagcgctgccgggcacggaaccgaaccaa

SEQ ID NO: 2231 - DNA, 30 bp, synthetic construct
  source 1..30: mol_type = other DNA
aaagcgctgccgggcacgggcccgaaccaa

SEQ ID NO: 2232 - DNA, 30 bp, synthetic construct
  source 1..30: mol_type = other DNA
aaagcgctgccgggcacgtttccgaaccaa

SEQ ID NO: 2233 - DNA, 30 bp, synthetic construct
  source 1..30: mol_type = other DNA
aaagcgctgccgggcacgtatccgaaccaa

SEQ ID NO: 2234 - DNA, 30 bp, synthetic construct
  source 1..30: mol_type = other DNA
aaagcgctgccgggcacgtgcccgaaccaa

SEQ ID NO: 2235 - DNA, 30 bp, synthetic construct
  source 1..30: mol_type = other DNA
aaagcgctgccgggcacgtggccgaaccaa

SEQ ID NO: 2236 - DNA, 30 bp, synthetic construct
  source 1..30: mol_type = other DNA
aaagcgctgccgggcacggacattaaccaa

SEQ ID NO: 2237 - DNA, 30 bp, synthetic construct
  source 1..30: mol_type = other DNA
aaagcgctgccgggcacggacatgaaccaa

SEQ ID NO: 2238 - DNA, 30 bp, synthetic construct
  source 1..30: mol_type = other DNA
aaagcgctgccgggcacggacaccaaccaa

SEQ ID NO: 2239 - DNA, 30 bp, synthetic construct
  source 1..30: mol_type = other DNA
aaagcgctgccgggcacggacaacaaccaa

SEQ ID NO: 2240 - DNA, 30 bp, synthetic construct
  source 1..30: mol_type = other DNA
aaagcgctgccgggcacggacaaaaaccaa

SEQ ID NO: 2241 - DNA, 30 bp, synthetic construct
  source 1..30: mol_type = other DNA
aaagcgctgccgggcacggacagcaaccaa

SEQ ID NO: 2242 - DNA, 30 bp, synthetic construct
  source 1..30: mol_type = other DNA
aaagcgctgccgggcacggaccgtaaccaa

SEQ ID NO: 2243 - DNA, 30 bp, synthetic construct
  source 1..30: mol_type = other DNA
aaagcgctgccgggcacggacctgaaccaa

SEQ ID NO: 2244 - DNA, 30 bp, synthetic construct
  source 1..30: mol_type = other DNA
aaagcgctgccgggcacggaccataaccaa

SEQ ID NO: 2245 - DNA, 30 bp, synthetic construct
  source 1..30: mol_type = other DNA
aaagcgctgccgggcacggaccagaaccaa

SEQ ID NO: 2246 - DNA, 30 bp, synthetic construct
  source 1..30: mol_type = other DNA
aaagcgctgccgggcacggacgtgaaccaa

SEQ ID NO: 2247 - DNA, 30 bp, synthetic construct
  source 1..30: mol_type = other DNA
aaagcgctgccgggcacggacgcgaaccaa

SEQ ID NO: 2248 - DNA, 30 bp, synthetic construct
  source 1..30: mol_type = other DNA
aaagcgctgccgggcacggacgataaccaa

SEQ ID NO: 2249 - DNA, 30 bp, synthetic construct
  source 1..30: mol_type = other DNA
aaagcgctgccgggcacggacgaaaaccaa

SEQ ID NO: 2250 - DNA, 30 bp, synthetic construct
  source 1..30: mol_type = other DNA
aaagcgctgccgggcacggacggcaaccaa

SEQ ID NO: 2251 - DNA, 30 bp, synthetic construct
  source 1..30: mol_type = other DNA
aaagcgctgccgggcacggactttaaccaa

SEQ ID NO: 2252 - DNA, 30 bp, synthetic construct
  source 1..30: mol_type = other DNA
aaagcgctgccgggcacggactataaccaa

SEQ ID NO: 2253 - DNA, 30 bp, synthetic construct
  source 1..30: mol_type = other DNA
aaagcgctgccgggcacggactgcaaccaa

SEQ ID NO: 2254 - DNA, 30 bp, synthetic construct
  source 1..30: mol_type = other DNA
aaagcgctgccgggcacggactggaaccaa

SEQ ID NO: 2255 - DNA, 30 bp, synthetic construct
  source 1..30: mol_type = other DNA
aaagcgctgccgggcacggacccgattcaa

SEQ ID NO: 2256 - DNA, 30 bp, synthetic construct
  source 1..30: mol_type = other DNA
aaagcgctgccgggcacggacccgatgcaa

SEQ ID NO: 2257 - DNA, 30 bp, synthetic construct
  source 1..30: mol_type = other DNA
aaagcgctgccgggcacggacccgacccaa

SEQ ID NO: 2258 - DNA, 30 bp, synthetic construct
  source 1..30: mol_type = other DNA
aaagcgctgccgggcacggacccgaaacaa

SEQ ID NO: 2259 - DNA, 30 bp, synthetic construct
  source 1..30: mol_type = other DNA
aaagcgctgccgggcacggacccgagccaa

SEQ ID NO: 2260 - DNA, 30 bp, synthetic construct
  source 1..30: mol_type = other DNA
aaagcgctgccgggcacggacccgcgtcaa

SEQ ID NO: 2261 - DNA, 30 bp, synthetic construct
  source 1..30: mol_type = other DNA
aaagcgctgccgggcacggacccgctgcaa

SEQ ID NO: 2262 - DNA, 30 bp, synthetic construct
  source 1..30: mol_type = other DNA
aaagcgctgccgggcacggacccgccgcaa

SEQ ID NO: 2263 - DNA, 30 bp, synthetic construct
  source 1..30: mol_type = other DNA
aaagcgctgccgggcacggacccgcatcaa

SEQ ID NO: 2264 - DNA, 30 bp, synthetic construct
  source 1..30: mol_type = other DNA
aaagcgctgccgggcacggacccgcagcaa

SEQ ID NO: 2265 - DNA, 30 bp, synthetic construct
  source 1..30: mol_type = other DNA
aaagcgctgccgggcacggacccggtgcaa

SEQ ID NO: 2266 - DNA, 30 bp, synthetic construct
  source 1..30: mol_type = other DNA
aaagcgctgccgggcacggacccggcgcaa

SEQ ID NO: 2267 - DNA, 30 bp, synthetic construct
  source 1..30: mol_type = other DNA
aaagcgctgccgggcacggacccggatcaa

SEQ ID NO: 2268 - DNA, 30 bp, synthetic construct
  source 1..30: mol_type = other DNA
aaagcgctgccgggcacggacccggaacaa

SEQ ID NO: 2269 - DNA, 30 bp, synthetic construct
  source 1..30: mol_type = other DNA
aaagcgctgccgggcacggacccgggccaa

SEQ ID NO: 2270 - DNA, 30 bp, synthetic construct
  source 1..30: mol_type = other DNA
aaagcgctgccgggcacggacccgtttcaa

SEQ ID NO: 2271 - DNA, 30 bp, synthetic construct
  source 1..30: mol_type = other DNA
aaagcgctgccgggcacggacccgtatcaa

SEQ ID NO: 2272 - DNA, 30 bp, synthetic construct
  source 1..30: mol_type = other DNA
aaagcgctgccgggcacggacccgtgccaa

SEQ ID NO: 2273 - DNA, 30 bp, synthetic construct
  source 1..30: mol_type = other DNA
aaagcgctgccgggcacggacccgtggcaa

SEQ ID NO: 2274 - DNA, 30 bp, synthetic construct
  source 1..30: mol_type = other DNA
aaagcgctgccgggcacggacccgaacatt

SEQ ID NO: 2275 - DNA, 30 bp, synthetic construct
  source 1..30: mol_type = other DNA
aaagcgctgccgggcacggacccgaacatg

SEQ ID NO: 2276 - DNA, 30 bp, synthetic construct
  source 1..30: mol_type = other DNA
aaagcgctgccgggcacggacccgaacacc

SEQ ID NO: 2277 - DNA, 30 bp, synthetic construct
  source 1..30: mol_type = other DNA
aaagcgctgccgggcacggacccgaacaac

SEQ ID NO: 2278 - DNA, 30 bp, synthetic construct
  source 1..30: mol_type = other DNA
aaagcgctgccgggcacggacccgaacaaa

SEQ ID NO: 2279 - DNA, 30 bp, synthetic construct
  source 1..30: mol_type = other DNA
aaagcgctgccgggcacggacccgaacagc

SEQ ID NO: 2280 - DNA, 30 bp, synthetic construct
  source 1..30: mol_type = other DNA
aaagcgctgccgggcacggacccgaaccgt

SEQ ID NO: 2281 - DNA, 30 bp, synthetic construct
  source 1..30: mol_type = other DNA
aaagcgctgccgggcacggacccgaacctg

SEQ ID NO: 2282 - DNA, 30 bp, synthetic construct
  source 1..30: mol_type = other DNA
aaagcgctgccgggcacggacccgaacccg

SEQ ID NO: 2283 - DNA, 30 bp, synthetic construct
  source 1..30: mol_type = other DNA
aaagcgctgccgggcacggacccgaaccat

SEQ ID NO: 2284 - DNA, 30 bp, synthetic construct
  source 1..30: mol_type = other DNA
aaagcgctgccgggcacggacccgaacgtg

SEQ ID NO: 2285 - DNA, 30 bp, synthetic construct
  source 1..30: mol_type = other DNA
aaagcgctgccgggcacggacccgaacgcg

SEQ ID NO: 2286 - DNA, 30 bp, synthetic construct
  source 1..30: mol_type = other DNA
aaagcgctgccgggcacggacccgaacgat

SEQ ID NO: 2287 - DNA, 30 bp, synthetic construct
  source 1..30: mol_type = other DNA
aaagcgctgccgggcacggacccgaacgaa

SEQ ID NO: 2288 - DNA, 30 bp, synthetic construct
  source 1..30: mol_type = other DNA
aaagcgctgccgggcacggacccgaacggc

SEQ ID NO: 2289 - DNA, 30 bp, synthetic construct
  source 1..30: mol_type = other DNA
aaagcgctgccgggcacggacccgaacttt

SEQ ID NO: 2290 - DNA, 30 bp, synthetic construct
  source 1..30: mol_type = other DNA
aaagcgctgccgggcacggacccgaactat

SEQ ID NO: 2291 - DNA, 30 bp, synthetic construct
  source 1..30: mol_type = other DNA
aaagcgctgccgggcacggacccgaactgc

SEQ ID NO: 2292 - DNA, 30 bp, synthetic construct
  source 1..30: mol_type = other DNA
aaagcgctgccgggcacggacccgaactgg

SEQ ID NO: 2293 - DNA, 30 bp, Bacillus subtilis
  source 1..30: mol_type = genomic DNA
aaaatcctgtacacttccatctactcttcc

SEQ ID NO: 2294 - DNA, 30 bp, synthetic construct
  source 1..30: mol_type = other DNA
attatcctgtacacttccatctactcttcc

SEQ ID NO: 2295 - DNA, 30 bp, synthetic construct
  source 1..30: mol_type = other DNA
atgatcctgtacacttccatctactcttcc

SEQ ID NO: 2296 - DNA, 30 bp, synthetic construct
  source 1..30: mol_type = other DNA
accatcctgtacacttccatctactcttcc

SEQ ID NO: 2297 - DNA, 30 bp, synthetic construct
  source 1..30: mol_type = other DNA
aacatcctgtacacttccatctactcttcc

SEQ ID NO: 2298 - DNA, 30 bp, synthetic construct
  source 1..30: mol_type = other DNA
agcatcctgtacacttccatctactcttcc

SEQ ID NO: 2299 - DNA, 30 bp, synthetic construct
  source 1..30: mol_type = other DNA
cgtatcctgtacacttccatctactcttcc

SEQ ID NO: 2300 - DNA, 30 bp, synthetic construct
  source 1..30: mol_type = other DNA
ctgatcctgtacacttccatctactcttcc

SEQ ID NO: 2301 - DNA, 30 bp, synthetic construct
  source 1..30: mol_type = other DNA
ccgatcctgtacacttccatctactcttcc

SEQ ID NO: 2302 - DNA, 30 bp, synthetic construct
  source 1..30: mol_type = other DNA
catatcctgtacacttccatctactcttcc

SEQ ID NO: 2303 - DNA, 30 bp, synthetic construct
  source 1..30: mol_type = other DNA
cagatcctgtacacttccatctactcttcc

SEQ ID NO: 2304 - DNA, 30 bp, synthetic construct
  source 1..30: mol_type = other DNA
gtgatcctgtacacttccatctactcttcc

SEQ ID NO: 2305 - DNA, 30 bp, synthetic construct
  source 1..30: mol_type = other DNA
gcgatcctgtacacttccatctactcttcc

SEQ ID NO: 2306 - DNA, 30 bp, synthetic construct
  source 1..30: mol_type = other DNA
gatatcctgtacacttccatctactcttcc

SEQ ID NO: 2307 - DNA, 30 bp, synthetic construct
  source 1..30: mol_type = other DNA
gaaatcctgtacacttccatctactcttcc

SEQ ID NO: 2308 - DNA, 30 bp, synthetic construct
  source 1..30: mol_type = other DNA
ggcatcctgtacacttccatctactcttcc

SEQ ID NO: 2309 - DNA, 30 bp, synthetic construct
  source 1..30: mol_type = other DNA
tttatcctgtacacttccatctactcttcc

SEQ ID NO: 2310 - DNA, 30 bp, synthetic construct
  source 1..30: mol_type = other DNA
tatatcctgtacacttccatctactcttcc

SEQ ID NO: 2311 - DNA, 30 bp, synthetic construct
  source 1..30: mol_type = other DNA
tgcatcctgtacacttccatctactcttcc

SEQ ID NO: 2312 - DNA, 30 bp, synthetic construct
  source 1..30: mol_type = other DNA
tggatcctgtacacttccatctactcttcc

SEQ ID NO: 2313 - DNA, 30 bp, synthetic construct
  source 1..30: mol_type = other DNA
aaaatgctgtacacttccatctactcttcc

SEQ ID NO: 2314 - DNA, 30 bp, synthetic construct
  source 1..30: mol_type = other DNA
aaaaccctgtacacttccatctactcttcc

SEQ ID NO: 2315 - DNA, 30 bp, synthetic construct
  source 1..30: mol_type = other DNA
aaaaacctgtacacttccatctactcttcc

SEQ ID NO: 2316 - DNA, 30 bp, synthetic construct
  source 1..30: mol_type = other DNA
aaaaaactgtacacttccatctactcttcc

SEQ ID NO: 2317 - DNA, 30 bp, synthetic construct
  source 1..30: mol_type = other DNA
aaaagcctgtacacttccatctactcttcc

SEQ ID NO: 2318 - DNA, 30 bp, synthetic construct
  source 1..30: mol_type = other DNA
aaacgtctgtacacttccatctactcttcc

SEQ ID NO: 2319 - DNA, 30 bp, synthetic construct
  source 1..30: mol_type = other DNA
aaactgctgtacacttccatctactcttcc

SEQ ID NO: 2320 - DNA, 30 bp, synthetic construct
  source 1..30: mol_type = other DNA
aaaccgctgtacacttccatctactcttcc

SEQ ID NO: 2321 - DNA, 30 bp, synthetic construct
  source 1..30: mol_type = other DNA
aaacatctgtacacttccatctactcttcc

SEQ ID NO: 2322 - DNA, 30 bp, synthetic construct
  source 1..30: mol_type = other DNA
aaacagctgtacacttccatctactcttcc

SEQ ID NO: 2323 - DNA, 30 bp, synthetic construct
  source 1..30: mol_type = other DNA
aaagtgctgtacacttccatctactcttcc

SEQ ID NO: 2324 - DNA, 30 bp, synthetic construct
  source 1..30: mol_type = other DNA
aaagcgctgtacacttccatctactcttcc

SEQ ID NO: 2325 - DNA, 30 bp, synthetic construct
  source 1..30: mol_type = other DNA
aaagatctgtacacttccatctactcttcc

SEQ ID NO: 2326 - DNA, 30 bp, synthetic construct
  source 1..30: mol_type = other DNA
aaagaactgtacacttccatctactcttcc

SEQ ID NO: 2327 - DNA, 30 bp, synthetic construct
  source 1..30: mol_type = other DNA
aaaggcctgtacacttccatctactcttcc

SEQ ID NO: 2328 - DNA, 30 bp, synthetic construct
  source 1..30: mol_type = other DNA
aaatttctgtacacttccatctactcttcc

SEQ ID NO: 2329 - DNA, 30 bp, synthetic construct
  source 1..30: mol_type = other DNA
aaatatctgtacacttccatctactcttcc

SEQ ID NO: 2330 - DNA, 30 bp, synthetic construct
  source 1..30: mol_type = other DNA
aaatgcctgtacacttccatctactcttcc

SEQ ID NO: 2331 - DNA, 30 bp, synthetic construct
  source 1..30: mol_type = other DNA
aaatggctgtacacttccatctactcttcc

SEQ ID NO: 2332 - DNA, 30 bp, synthetic construct
  source 1..30: mol_type = other DNA
aaaatcatttacacttccatctactcttcc

SEQ ID NO: 2333 - DNA, 30 bp, synthetic construct
  source 1..30: mol_type = other DNA
aaaatcatgtacacttccatctactcttcc

SEQ ID NO: 2334 - DNA, 30 bp, synthetic construct
  source 1..30: mol_type = other DNA
aaaatcacctacacttccatctactcttcc

SEQ ID NO: 2335 - DNA, 30 bp, synthetic construct
  source 1..30: mol_type = other DNA
aaaatcaactacacttccatctactcttcc

SEQ ID NO: 2336 - DNA, 30 bp, synthetic construct
  source 1..30: mol_type = other DNA
aaaatcaaatacacttccatctactcttcc

SEQ ID NO: 2337 - DNA, 30 bp, synthetic construct
  source 1..30: mol_type = other DNA
aaaatcagctacacttccatctactcttcc

SEQ ID NO: 2338 - DNA, 30 bp, synthetic construct
  source 1..30: mol_type = other DNA
aaaatccgttacacttccatctactcttcc

SEQ ID NO: 2339 - DNA, 30 bp, synthetic construct
  source 1..30: mol_type = other DNA
aaaatcccgtacacttccatctactcttcc

SEQ ID NO: 2340 - DNA, 30 bp, synthetic construct
  source 1..30: mol_type = other DNA
aaaatccattacacttccatctactcttcc

SEQ ID NO: 2341 - DNA, 30 bp, synthetic construct
  source 1..30: mol_type = other DNA
aaaatccagtacacttccatctactcttcc

SEQ ID NO: 2342 - DNA, 30 bp, synthetic construct
  source 1..30: mol_type = other DNA
aaaatcgtgtacacttccatctactcttcc

SEQ ID NO: 2343 - DNA, 30 bp, synthetic construct
  source 1..30: mol_type = other DNA
aaaatcgcgtacacttccatctactcttcc

SEQ ID NO: 2344 - DNA, 30 bp, synthetic construct
  source 1..30: mol_type = other DNA
aaaatcgattacacttccatctactcttcc

SEQ ID NO: 2345 - DNA, 30 bp, synthetic construct
  source 1..30: mol_type = other DNA
aaaatcgaatacacttccatctactcttcc

SEQ ID NO: 2346 - DNA, 30 bp, synthetic construct
  source 1..30: mol_type = other DNA
aaaatcggctacacttccatctactcttcc

SEQ ID NO: 2347 - DNA, 30 bp, synthetic construct
  source 1..30: mol_type = other DNA
aaaatcttttacacttccatctactcttcc

SEQ ID NO: 2348 - DNA, 30 bp, synthetic construct
  source 1..30: mol_type = other DNA
aaaatctattacacttccatctactcttcc

SEQ ID NO: 2349 - DNA, 30 bp, synthetic construct
  source 1..30: mol_type = other DNA
aaaatctgctacacttccatctactcttcc

SEQ ID NO: 2350 - DNA, 30 bp, synthetic construct
  source 1..30: mol_type = other DNA
aaaatctggtacacttccatctactcttcc

SEQ ID NO: 2351 - DNA, 30 bp, synthetic construct
  source 1..30: mol_type = other DNA
aaaatcctgattacttccatctactcttcc

SEQ ID NO: 2352 - DNA, 30 bp, synthetic construct
  source 1..30: mol_type = other DNA
aaaatcctgatgacttccatctactcttcc

SEQ ID NO: 2353 - DNA, 30 bp, synthetic construct
  source 1..30: mol_type = other DNA
aaaatcctgaccacttccatctactcttcc

SEQ ID NO: 2354 - DNA, 30 bp, synthetic construct
  source 1..30: mol_type = other DNA
aaaatcctgaacacttccatctactcttcc

SEQ ID NO: 2355 - DNA, 30 bp, synthetic construct
  source 1..30: mol_type = other DNA
aaaatcctgaaaacttccatctactcttcc

SEQ ID NO: 2356 - DNA, 30 bp, synthetic construct
  source 1..30: mol_type = other DNA
aaaatcctgagcacttccatctactcttcc

SEQ ID NO: 2357 - DNA, 30 bp, synthetic construct
  source 1..30: mol_type = other DNA
aaaatcctgcgtacttccatctactcttcc

SEQ ID NO: 2358 - DNA, 30 bp, synthetic construct
  source 1..30: mol_type = other DNA
aaaatcctgctgacttccatctactcttcc

SEQ ID NO: 2359 - DNA, 30 bp, synthetic construct
  source 1..30: mol_type = other DNA
aaaatcctgccgacttccatctactcttcc

SEQ ID NO: 2360 - DNA, 30 bp, synthetic construct
  source 1..30: mol_type = other DNA
aaaatcctgcatacttccatctactcttcc

SEQ ID NO: 2361 - DNA, 30 bp, synthetic construct
  source 1..30: mol_type = other DNA
aaaatcctgcagacttccatctactcttcc

SEQ ID NO: 2362 - DNA, 30 bp, synthetic construct
  source 1..30: mol_type = other DNA
aaaatcctggtgacttccatctactcttcc

SEQ ID NO: 2363 - DNA, 30 bp, synthetic construct
  source 1..30: mol_type = other DNA
aaaatcctggcgacttccatctactcttcc

SEQ ID NO: 2364 - DNA, 30 bp, synthetic construct
  source 1..30: mol_type = other DNA
aaaatcctggatacttccatctactcttcc

SEQ ID NO: 2365 - DNA, 30 bp, synthetic construct
  source 1..30: mol_type = other DNA
aaaatcctggaaacttccatctactcttcc

SEQ ID NO: 2366 - DNA, 30 bp, synthetic construct
  source 1..30: mol_type = other DNA
aaaatcctgggcacttccatctactcttcc

SEQ ID NO: 2367 - DNA, 30 bp, synthetic construct
  source 1..30: mol_type = other DNA
aaaatcctgtttacttccatctactcttcc

SEQ ID NO: 2368 - DNA, 30 bp, synthetic construct
  source 1..30: mol_type = other DNA
aaaatcctgtgcacttccatctactcttcc

SEQ ID NO: 2369 - DNA, 30 bp, synthetic construct
  source 1..30: mol_type = other DNA
aaaatcctgtggacttccatctactcttcc

SEQ ID NO: 2370 - DNA, 30 bp, synthetic construct
  source 1..30: mol_type = other DNA
aaaatcctgtacatttccatctactcttcc

SEQ ID NO: 2371 - DNA, 30 bp, synthetic construct
  source 1..30: mol_type = other DNA
aaaatcctgtacatgtccatctactcttcc

SEQ ID NO: 2372 - DNA, 30 bp, synthetic construct
  source 1..30: mol_type = other DNA
aaaatcctgtacaactccatctactcttcc

SEQ ID NO: 2373 - DNA, 30 bp, synthetic construct
  source 1..30: mol_type = other DNA
aaaatcctgtacaaatccatctactcttcc

SEQ ID NO: 2374 - DNA, 30 bp, synthetic construct
  source 1..30: mol_type = other DNA
aaaatcctgtacagctccatctactcttcc

SEQ ID NO: 2375 - DNA, 30 bp, synthetic construct
  source 1..30: mol_type = other DNA
aaaatcctgtaccgttccatctactcttcc

SEQ ID NO: 2376 - DNA, 30 bp, synthetic construct
  source 1..30: mol_type = other DNA
aaaatcctgtacctgtccatctactcttcc

SEQ ID NO: 2377 - DNA, 30 bp, synthetic construct
  source 1..30: mol_type = other DNA
aaaatcctgtacccgtccatctactcttcc

SEQ ID NO: 2378 - DNA, 30 bp, synthetic construct
  source 1..30: mol_type = other DNA
aaaatcctgtaccattccatctactcttcc

SEQ ID NO: 2379 - DNA, 30 bp, synthetic construct
  source 1..30: mol_type = other DNA
aaaatcctgtaccagtccatctactcttcc

SEQ ID NO: 2380 - DNA, 30 bp, synthetic construct
  source 1..30: mol_type = other DNA
aaaatcctgtacgtgtccatctactcttcc

SEQ ID NO: 2381 - DNA, 30 bp, synthetic construct
  source 1..30: mol_type = other DNA
aaaatcctgtacgcgtccatctactcttcc

SEQ ID NO: 2382 - DNA, 30 bp, synthetic construct
  source 1..30: mol_type = other DNA
aaaatcctgtacgattccatctactcttcc

SEQ ID NO: 2383 - DNA, 30 bp, synthetic construct
  source 1..30: mol_type = other DNA
aaaatcctgtacgaatccatctactcttcc

SEQ ID NO: 2384 - DNA, 30 bp, synthetic construct
  source 1..30: mol_type = other DNA
aaaatcctgtacggctccatctactcttcc

SEQ ID NO: 2385 - DNA, 30 bp, synthetic construct
  source 1..30: mol_type = other DNA
aaaatcctgtacttttccatctactcttcc

SEQ ID NO: 2386 - DNA, 30 bp, synthetic construct
  source 1..30: mol_type = other DNA
aaaatcctgtactattccatctactcttcc

SEQ ID NO: 2387 - DNA, 30 bp, synthetic construct
  source 1..30: mol_type = other DNA
aaaatcctgtactgctccatctactcttcc

SEQ ID NO: 2388 - DNA, 30 bp, synthetic construct
  source 1..30: mol_type = other DNA
aaaatcctgtactggtccatctactcttcc

SEQ ID NO: 2389 - DNA, 30 bp, synthetic construct
  source 1..30: mol_type = other DNA
aaaatcctgtacactattatctactcttcc

SEQ ID NO: 2390 - DNA, 30 bp, synthetic construct
  source 1..30: mol_type = other DNA
aaaatcctgtacactatgatctactcttcc

SEQ ID NO: 2391 - DNA, 30 bp, synthetic construct
  source 1..30: mol_type = other DNA
aaaatcctgtacactaccatctactcttcc

SEQ ID NO: 2392 - DNA, 30 bp, synthetic construct
  source 1..30: mol_type = other DNA
aaaatcctgtacactaacatctactcttcc

SEQ ID NO: 2393 - DNA, 30 bp, synthetic construct
  source 1..30: mol_type = other DNA
aaaatcctgtacactaaaatctactcttcc

SEQ ID NO: 2394 - DNA, 30 bp, synthetic construct
  source 1..30: mol_type = other DNA
aaaatcctgtacactcgtatctactcttcc

SEQ ID NO: 2395 - DNA, 30 bp, synthetic construct
  source 1..30: mol_type = other DNA
aaaatcctgtacactctgatctactcttcc

SEQ ID NO: 2396 - DNA, 30 bp, synthetic construct
  source 1..30: mol_type = other DNA
aaaatcctgtacactccgatctactcttcc

SEQ ID NO: 2397 - DNA, 30 bp, synthetic construct
  source 1..30: mol_type = other DNA
aaaatcctgtacactcatatctactcttcc

SEQ ID NO: 2398 - DNA, 30 bp, synthetic construct
  source 1..30: mol_type = other DNA
aaaatcctgtacactcagatctactcttcc

SEQ ID NO: 2399 - DNA, 30 bp, synthetic construct
  source 1..30: mol_type = other DNA
aaaatcctgtacactgtgatctactcttcc

SEQ ID NO: 2400 - DNA, 30 bp, synthetic construct
  source 1..30: mol_type = other DNA
aaaatcctgtacactgcgatctactcttcc

SEQ ID NO: 2401 - DNA, 30 bp, synthetic construct
  source 1..30: mol_type = other DNA
aaaatcctgtacactgatatctactcttcc

SEQ ID NO: 2402 - DNA, 30 bp, synthetic construct
  source 1..30: mol_type = other DNA
aaaatcctgtacactgaaatctactcttcc

SEQ ID NO: 2403 - DNA, 30 bp, synthetic construct
  source 1..30: mol_type = other DNA
aaaatcctgtacactggcatctactcttcc

SEQ ID NO: 2404 - DNA, 30 bp, synthetic construct
  source 1..30: mol_type = other DNA
aaaatcctgtacacttttatctactcttcc

SEQ ID NO: 2405 - DNA, 30 bp, synthetic construct
  source 1..30: mol_type = other DNA
aaaatcctgtacacttatatctactcttcc

SEQ ID NO: 2406 - DNA, 30 bp, synthetic construct
  source 1..30: mol_type = other DNA
aaaatcctgtacacttgcatctactcttcc

SEQ ID NO: 2407 - DNA, 30 bp, synthetic construct
  source 1..30: mol_type = other DNA
aaaatcctgtacacttggatctactcttcc

SEQ ID NO: 2408 - DNA, 30 bp, synthetic construct
  source 1..30: mol_type = other DNA
aaaatcctgtacacttccatgtactcttcc

SEQ ID NO: 2409 - DNA, 30 bp, synthetic construct
  source 1..30: mol_type = other DNA
aaaatcctgtacacttccacctactcttcc

SEQ ID NO: 2410 - DNA, 30 bp, synthetic construct
  source 1..30: mol_type = other DNA
aaaatcctgtacacttccaactactcttcc

SEQ ID NO: 2411 - DNA, 30 bp, synthetic construct
  source 1..30: mol_type = other DNA
aaaatcctgtacacttccaaatactcttcc

SEQ ID NO: 2412 - DNA, 30 bp, synthetic construct
  source 1..30: mol_type = other DNA
aaaatcctgtacacttccagctactcttcc

SEQ ID NO: 2413 - DNA, 30 bp, synthetic construct
  source 1..30: mol_type = other DNA
aaaatcctgtacacttcccgttactcttcc

SEQ ID NO: 2414 - DNA, 30 bp, synthetic construct
  source 1..30: mol_type = other DNA
aaaatcctgtacacttccctgtactcttcc

SEQ ID NO: 2415 - DNA, 30 bp, synthetic construct
  source 1..30: mol_type = other DNA
aaaatcctgtacacttccccgtactcttcc

SEQ ID NO: 2416 - DNA, 30 bp, synthetic construct
  source 1..30: mol_type = other DNA
aaaatcctgtacacttcccattactcttcc

SEQ ID NO: 2417 - DNA, 30 bp, synthetic construct
  source 1..30: mol_type = other DNA
aaaatcctgtacacttcccagtactcttcc

SEQ ID NO: 2418 - DNA, 30 bp, synthetic construct
  source 1..30: mol_type = other DNA
aaaatcctgtacacttccgtgtactcttcc

SEQ ID NO: 2419 - DNA, 30 bp, synthetic construct
  source 1..30: mol_type = other DNA
aaaatcctgtacacttccgcgtactcttcc

SEQ ID NO: 2420 - DNA, 30 bp, synthetic construct
  source 1..30: mol_type = other DNA
aaaatcctgtacacttccgattactcttcc

SEQ ID NO: 2421 - DNA, 30 bp, synthetic construct
  source 1..30: mol_type = other DNA
aaaatcctgtacacttccgaatactcttcc

SEQ ID NO: 2422 - DNA, 30 bp, synthetic construct
  source 1..30: mol_type = other DNA
aaaatcctgtacacttccggctactcttcc

SEQ ID NO: 2423 - DNA, 30 bp, synthetic construct
  source 1..30: mol_type = other DNA
aaaatcctgtacacttccttttactcttcc

SEQ ID NO: 2424 - DNA, 30 bp, synthetic construct
  source 1..30: mol_type = other DNA
aaaatcctgtacacttcctattactcttcc

SEQ ID NO: 2425 - DNA, 30 bp, synthetic construct
  source 1..30: mol_type = other DNA
aaaatcctgtacacttcctgctactcttcc

SEQ ID NO: 2426 - DNA, 30 bp, synthetic construct
  source 1..30: mol_type = other DNA
aaaatcctgtacacttcctggtactcttcc

SEQ ID NO: 2427 - DNA, 30 bp, synthetic construct
  source 1..30: mol_type = other DNA
aaaatcctgtacacttccatcatttcttcc

SEQ ID NO: 2428 - DNA, 30 bp, synthetic construct
  source 1..30: mol_type = other DNA
aaaatcctgtacacttccatcatgtcttcc

SEQ ID NO: 2429 - DNA, 30 bp, synthetic construct
  source 1..30: mol_type = other DNA
aaaatcctgtacacttccatcacctcttcc

SEQ ID NO: 2430 - DNA, 30 bp, synthetic construct
  source 1..30: mol_type = other DNA
aaaatcctgtacacttccatcaactcttcc

SEQ ID NO: 2431 - DNA, 30 bp, synthetic construct
  source 1..30: mol_type = other DNA
aaaatcctgtacacttccatcaaatcttcc

SEQ ID NO: 2432 - DNA, 30 bp, synthetic construct
  source 1..30: mol_type = other DNA
aaaatcctgtacacttccatcagctcttcc

SEQ ID NO: 2433 - DNA, 30 bp, synthetic construct
  source 1..30: mol_type = other DNA
aaaatcctgtacacttccatccgttcttcc

SEQ ID NO: 2434 - DNA, 30 bp, synthetic construct
  source 1..30: mol_type = other DNA
aaaatcctgtacacttccatcctgtcttcc

SEQ ID NO: 2435 - DNA, 30 bp, synthetic construct
  source 1..30: mol_type = other DNA
aaaatcctgtacacttccatcccgtcttcc

SEQ ID NO: 2436 - DNA, 30 bp, synthetic construct
  source 1..30: mol_type = other DNA
aaaatcctgtacacttccatccattcttcc

SEQ ID NO: 2437 - DNA, 30 bp, synthetic construct
  source 1..30: mol_type = other DNA
aaaatcctgtacacttccatccagtcttcc

SEQ ID NO: 2438 - DNA, 30 bp, synthetic construct
  source 1..30: mol_type = other DNA
aaaatcctgtacacttccatcgtgtcttcc

SEQ ID NO: 2439 - DNA, 30 bp, synthetic construct
  source 1..30: mol_type = other DNA
aaaatcctgtacacttccatcgcgtcttcc

SEQ ID NO: 2440 - DNA, 30 bp, synthetic construct
  source 1..30: mol_type = other DNA
aaaatcctgtacacttccatcgattcttcc

SEQ ID NO: 2441 - DNA, 30 bp, synthetic construct
  source 1..30: mol_type = other DNA
aaaatcctgtacacttccatcgaatcttcc

SEQ ID NO: 2442 - DNA, 30 bp, synthetic construct
  source 1..30: mol_type = other DNA
aaaatcctgtacacttccatcggctcttcc

SEQ ID NO: 2443 - DNA, 30 bp, synthetic construct
  source 1..30: mol_type = other DNA
aaaatcctgtacacttccatcttttcttcc

SEQ ID NO: 2444 - DNA, 30 bp, synthetic construct
  source 1..30: mol_type = other DNA
aaaatcctgtacacttccatctgctcttcc

SEQ ID NO: 2445 - DNA, 30 bp, synthetic construct
  source 1..30: mol_type = other DNA
aaaatcctgtacacttccatctggtcttcc

SEQ ID NO: 2446 - DNA, 30 bp, synthetic construct
  source 1..30: mol_type = other DNA
aaaatcctgtacacttccatctacatttcc

SEQ ID NO: 2447 - DNA, 30 bp, synthetic construct
  source 1..30: mol_type = other DNA
aaaatcctgtacacttccatctacatgtcc

SEQ ID NO: 2448 - DNA, 30 bp, synthetic construct
  source 1..30: mol_type = other DNA
aaaatcctgtacacttccatctacacctcc

SEQ ID NO: 2449 - DNA, 30 bp, synthetic construct
  source 1..30: mol_type = other DNA
aaaatcctgtacacttccatctacaactcc

SEQ ID NO: 2450 - DNA, 30 bp, synthetic construct
  source 1..30: mol_type = other DNA
aaaatcctgtacacttccatctacaaatcc

SEQ ID NO: 2451 - DNA, 30 bp, synthetic construct
  source 1..30: mol_type = other DNA
aaaatcctgtacacttccatctaccgttcc

SEQ ID NO: 2452 - DNA, 30 bp, synthetic construct
  source 1..30: mol_type = other DNA
aaaatcctgtacacttccatctacctgtcc

SEQ ID NO: 2453 - DNA, 30 bp, synthetic construct
  source 1..30: mol_type = other DNA
aaaatcctgtacacttccatctacccgtcc

SEQ ID NO: 2454 - DNA, 30 bp, synthetic construct
  source 1..30: mol_type = other DNA
aaaatcctgtacacttccatctaccattcc

SEQ ID NO: 2455 - DNA, 30 bp, synthetic construct
  source 1..30: mol_type = other DNA
aaaatcctgtacacttccatctaccagtcc

SEQ ID NO: 2456 - DNA, 30 bp, synthetic construct
  source 1..30: mol_type = other DNA
aaaatcctgtacacttccatctacgtgtcc

SEQ ID NO: 2457 - DNA, 30 bp, synthetic construct
  source 1..30: mol_type = other DNA
aaaatcctgtacacttccatctacgcgtcc

SEQ ID NO: 2458 - DNA, 30 bp, synthetic construct
  source 1..30: mol_type = other DNA
aaaatcctgtacacttccatctacgattcc

SEQ ID NO: 2459 - DNA, 30 bp, synthetic construct
  source 1..30: mol_type = other DNA
aaaatcctgtacacttccatctacgaatcc

SEQ ID NO: 2460 - DNA, 30 bp, synthetic construct
  source 1..30: mol_type = other DNA
aaaatcctgtacacttccatctacggctcc

SEQ ID NO: 2461 - DNA, 30 bp, synthetic construct
  source 1..30: mol_type = other DNA
aaaatcctgtacacttccatctacttttcc

SEQ ID NO: 2462 - DNA, 30 bp, synthetic construct
  source 1..30: mol_type = other DNA
aaaatcctgtacacttccatctactattcc

SEQ ID NO: 2463 - DNA, 30 bp, synthetic construct
  source 1..30: mol_type = other DNA
aaaatcctgtacacttccatctactgctcc

SEQ ID NO: 2464 - DNA, 30 bp, synthetic construct
  source 1..30: mol_type = other DNA
aaaatcctgtacacttccatctactggtcc

SEQ ID NO: 2465 - DNA, 30 bp, synthetic construct
  source 1..30: mol_type = other DNA
aaaatcctgtacacttccatctactctatt

SEQ ID NO: 2466 - DNA, 30 bp, synthetic construct
  source 1..30: mol_type = other DNA
aaaatcctgtacacttccatctactctatg

SEQ ID NO: 2467 - DNA, 30 bp, synthetic construct
  source 1..30: mol_type = other DNA
aaaatcctgtacacttccatctactctacc

SEQ ID NO: 2468 - DNA, 30 bp, synthetic construct
  source 1..30: mol_type = other DNA
aaaatcctgtacacttccatctactctaac

SEQ ID NO: 2469 - DNA, 30 bp, synthetic construct
  source 1..30: mol_type = other DNA
aaaatcctgtacacttccatctactctaaa

SEQ ID NO: 2470 - DNA, 30 bp, synthetic construct
  source 1..30: mol_type = other DNA
aaaatcctgtacacttccatctactctcgt

SEQ ID NO: 2471 - DNA, 30 bp, synthetic construct
  source 1..30: mol_type = other DNA
aaaatcctgtacacttccatctactctctg

SEQ ID NO: 2472 - DNA, 30 bp, synthetic construct
  source 1..30: mol_type = other DNA
aaaatcctgtacacttccatctactctccg

SEQ ID NO: 2473 - DNA, 30 bp, synthetic construct
  source 1..30: mol_type = other DNA
aaaatcctgtacacttccatctactctcat

SEQ ID NO: 2474 - DNA, 30 bp, synthetic construct
  source 1..30: mol_type = other DNA
aaaatcctgtacacttccatctactctcag

SEQ ID NO: 2475 - DNA, 30 bp, synthetic construct
  source 1..30: mol_type = other DNA
aaaatcctgtacacttccatctactctgtg

SEQ ID NO: 2476 - DNA, 30 bp, synthetic construct
  source 1..30: mol_type = other DNA
aaaatcctgtacacttccatctactctgcg

SEQ ID NO: 2477 - DNA, 30 bp, synthetic construct
  source 1..30: mol_type = other DNA
aaaatcctgtacacttccatctactctgat

SEQ ID NO: 2478 - DNA, 30 bp, synthetic construct
  source 1..30: mol_type = other DNA
aaaatcctgtacacttccatctactctgaa

SEQ ID NO: 2479 - DNA, 30 bp, synthetic construct
  source 1..30: mol_type = other DNA
aaaatcctgtacacttccatctactctggc

SEQ ID NO: 2480 - DNA, 30 bp, synthetic construct
  source 1..30: mol_type = other DNA
aaaatcctgtacacttccatctactctttt

SEQ ID NO: 2481 - DNA, 30 bp, synthetic construct
  source 1..30: mol_type = other DNA
aaaatcctgtacacttccatctactcttat

SEQ ID NO: 2482 - DNA, 30 bp, synthetic construct
  source 1..30: mol_type = other DNA
aaaatcctgtacacttccatctactcttgc

SEQ ID NO: 2483 - DNA, 30 bp, synthetic construct
  source 1..30: mol_type = other DNA
aaaatcctgtacacttccatctactcttgg

SEQ ID NO: 2484 - DNA, 30 bp, Bacillus subtilis
  source 1..30: mol_type = genomic DNA
gcggacatgatcgttatgaattacctgtcc

SEQ ID NO: 2485 - DNA, 30 bp, synthetic construct
  source 1..30: mol_type = other DNA
attgacatgatcgttatgaattacctgtcc

SEQ ID NO: 2486 - DNA, 30 bp, synthetic construct
  source 1..30: mol_type = other DNA
atggacatgatcgttatgaattacctgtcc

SEQ ID NO: 2487 - DNA, 30 bp, synthetic construct
  source 1..30: mol_type = other DNA
accgacatgatcgttatgaattacctgtcc

SEQ ID NO: 2488 - DNA, 30 bp, synthetic construct
  source 1..30: mol_type = other DNA
aacgacatgatcgttatgaattacctgtcc

SEQ ID NO: 2489 - DNA, 30 bp, synthetic construct
  source 1..30: mol_type = other DNA
aaagacatgatcgttatgaattacctgtcc

SEQ ID NO: 2490 - DNA, 30 bp, synthetic construct
  source 1..30: mol_type = other DNA
agcgacatgatcgttatgaattacctgtcc

SEQ ID NO: 2491 - DNA, 30 bp, synthetic construct
  source 1..30: mol_type = other DNA
cgtgacatgatcgttatgaattacctgtcc

SEQ ID NO: 2492 - DNA, 30 bp, synthetic construct
  source 1..30: mol_type = other DNA
ctggacatgatcgttatgaattacctgtcc

SEQ ID NO: 2493 - DNA, 30 bp, synthetic construct
  source 1..30: mol_type = other DNA
ccggacatgatcgttatgaattacctgtcc

SEQ ID NO: 2494 - DNA, 30 bp, synthetic construct
  source 1..30: mol_type = other DNA
catgacatgatcgttatgaattacctgtcc

SEQ ID NO: 2495 - DNA, 30 bp, synthetic construct
  source 1..30: mol_type = other DNA
caggacatgatcgttatgaattacctgtcc

SEQ ID NO: 2496 - DNA, 30 bp, synthetic construct
  source 1..30: mol_type = other DNA
gtggacatgatcgttatgaattacctgtcc

SEQ ID NO: 2497 - DNA, 30 bp, synthetic construct
  source 1..30: mol_type = other DNA
gatgacatgatcgttatgaattacctgtcc

SEQ ID NO: 2498 - DNA, 30 bp, synthetic construct
  source 1..30: mol_type = other DNA
gaagacatgatcgttatgaattacctgtcc

SEQ ID NO: 2499 - DNA, 30 bp, synthetic construct
  source 1..30: mol_type = other DNA
ggcgacatgatcgttatgaattacctgtcc

SEQ ID NO: 2500 - DNA, 30 bp, synthetic construct
  source 1..30: mol_type = other DNA
tttgacatgatcgttatgaattacctgtcc

SEQ ID NO: 2501 - DNA, 30 bp, synthetic construct
  source 1..30: mol_type = other DNA
tatgacatgatcgttatgaattacctgtcc

SEQ ID NO: 2502 - DNA, 30 bp, synthetic construct
  source 1..30: mol_type = other DNA
tgcgacatgatcgttatgaattacctgtcc

SEQ ID NO: 2503 - DNA, 30 bp, synthetic construct
  source 1..30: mol_type = other DNA
tgggacatgatcgttatgaattacctgtcc

SEQ ID NO: 2504 - DNA, 30 bp, synthetic construct
  source 1..30: mol_type = other DNA
gcgattatgatcgttatgaattacctgtcc

SEQ ID NO: 2505 - DNA, 30 bp, synthetic construct
  source 1..30: mol_type = other DNA
gcgatgatgatcgttatgaattacctgtcc

SEQ ID NO: 2506 - DNA, 30 bp, synthetic construct
  source 1..30: mol_type = other DNA
gcgaccatgatcgttatgaattacctgtcc

SEQ ID NO: 2507 - DNA, 30 bp, synthetic construct
  source 1..30: mol_type = other DNA
gcgaacatgatcgttatgaattacctgtcc

SEQ ID NO: 2508 - DNA, 30 bp, synthetic construct
  source 1..30: mol_type = other DNA
gcgaaaatgatcgttatgaattacctgtcc

SEQ ID NO: 2509 - DNA, 30 bp, synthetic construct
  source 1..30: mol_type = other DNA
gcgagcatgatcgttatgaattacctgtcc

SEQ ID NO: 2510 - DNA, 30 bp, synthetic construct
  source 1..30: mol_type = other DNA
gcgcgtatgatcgttatgaattacctgtcc

SEQ ID NO: 2511 - DNA, 30 bp, synthetic construct
  source 1..30: mol_type = other DNA
gcgctgatgatcgttatgaattacctgtcc

SEQ ID NO: 2512 - DNA, 30 bp, synthetic construct
  source 1..30: mol_type = other DNA
gcgccgatgatcgttatgaattacctgtcc

SEQ ID NO: 2513 - DNA, 30 bp, synthetic construct
  source 1..30: mol_type = other DNA
gcgcatatgatcgttatgaattacctgtcc

SEQ ID NO: 2514 - DNA, 30 bp, synthetic construct
  source 1..30: mol_type = other DNA
gcgcagatgatcgttatgaattacctgtcc

SEQ ID NO: 2515 - DNA, 30 bp, synthetic construct
  source 1..30: mol_type = other DNA
gcggtgatgatcgttatgaattacctgtcc

SEQ ID NO: 2516 - DNA, 30 bp, synthetic construct
  source 1..30: mol_type = other DNA
gcggcgatgatcgttatgaattacctgtcc

SEQ ID NO: 2517 - DNA, 30 bp, synthetic construct
  source 1..30: mol_type = other DNA
gcggaaatgatcgttatgaattacctgtcc

SEQ ID NO: 2518 - DNA, 30 bp, synthetic construct
  source 1..30: mol_type = other DNA
gcgggcatgatcgttatgaattacctgtcc

SEQ ID NO: 2519 - DNA, 30 bp, synthetic construct
  source 1..30: mol_type = other DNA
gcgtttatgatcgttatgaattacctgtcc

SEQ ID NO: 2520 - DNA, 30 bp, synthetic construct
  source 1..30: mol_type = other DNA
gcgtatatgatcgttatgaattacctgtcc

SEQ ID NO: 2521 - DNA, 30 bp, synthetic construct
  source 1..30: mol_type = other DNA
gcgtgcatgatcgttatgaattacctgtcc

SEQ ID NO: 2522 - DNA, 30 bp, synthetic construct
  source 1..30: mol_type = other DNA
gcgtggatgatcgttatgaattacctgtcc

SEQ ID NO: 2523 - DNA, 30 bp, synthetic construct
  source 1..30: mol_type = other DNA
gcggacattatcgttatgaattacctgtcc

SEQ ID NO: 2524 - DNA, 30 bp, synthetic construct
  source 1..30: mol_type = other DNA
gcggacaccatcgttatgaattacctgtcc

SEQ ID NO: 2525 - DNA, 30 bp, synthetic construct
  source 1..30: mol_type = other DNA
gcggacaacatcgttatgaattacctgtcc

SEQ ID NO: 2526 - DNA, 30 bp, synthetic construct
  source 1..30: mol_type = other DNA
gcggacaaaatcgttatgaattacctgtcc

SEQ ID NO: 2527 - DNA, 30 bp, synthetic construct
  source 1..30: mol_type = other DNA
gcggacagcatcgttatgaattacctgtcc

SEQ ID NO: 2528 - DNA, 30 bp, synthetic construct
  source 1..30: mol_type = other DNA
gcggaccgtatcgttatgaattacctgtcc

SEQ ID NO: 2529 - DNA, 30 bp, synthetic construct
  source 1..30: mol_type = other DNA
gcggacctgatcgttatgaattacctgtcc

SEQ ID NO: 2530 - DNA, 30 bp, synthetic construct
  source 1..30: mol_type = other DNA
gcggacccgatcgttatgaattacctgtcc

SEQ ID NO: 2531 - DNA, 30 bp, synthetic construct
  source 1..30: mol_type = other DNA
gcggaccatatcgttatgaattacctgtcc

SEQ ID NO: 2532 - DNA, 30 bp, synthetic construct
  source 1..30: mol_type = other DNA
gcggaccagatcgttatgaattacctgtcc

SEQ ID NO: 2533 - DNA, 30 bp, synthetic construct
  source 1..30: mol_type = other DNA
gcggacgtgatcgttatgaattacctgtcc

SEQ ID NO: 2534 - DNA, 30 bp, synthetic construct
  source 1..30: mol_type = other DNA
gcggacgcgatcgttatgaattacctgtcc

SEQ ID NO: 2535 - DNA, 30 bp, synthetic construct
  source 1..30: mol_type = other DNA
gcggacgatatcgttatgaattacctgtcc

SEQ ID NO: 2536 - DNA, 30 bp, synthetic construct
  source 1..30: mol_type = other DNA
gcggacgaaatcgttatgaattacctgtcc

SEQ ID NO: 2537 - DNA, 30 bp, synthetic construct
  source 1..30: mol_type = other DNA
gcggacggcatcgttatgaattacctgtcc

SEQ ID NO: 2538 - DNA, 30 bp, synthetic construct
  source 1..30: mol_type = other DNA
gcggactttatcgttatgaattacctgtcc

SEQ ID NO: 2539 - DNA, 30 bp, synthetic construct
  source 1..30: mol_type = other DNA
gcggactatatcgttatgaattacctgtcc

SEQ ID NO: 2540 - DNA, 30 bp, synthetic construct
  source 1..30: mol_type = other DNA
gcggactgcatcgttatgaattacctgtcc

SEQ ID NO: 2541 - DNA, 30 bp, synthetic construct
  source 1..30: mol_type = other DNA
gcggactggatcgttatgaattacctgtcc

SEQ ID NO: 2542 - DNA, 30 bp, synthetic construct
  source 1..30: mol_type = other DNA
gcggacatgatggttatgaattacctgtcc

SEQ ID NO: 2543 - DNA, 30 bp, synthetic construct
  source 1..30: mol_type = other DNA
gcggacatgaccgttatgaattacctgtcc

SEQ ID NO: 2544 - DNA, 30 bp, synthetic construct
  source 1..30: mol_type = other DNA
gcggacatgaacgttatgaattacctgtcc

SEQ ID NO: 2545 - DNA, 30 bp, synthetic construct
  source 1..30: mol_type = other DNA
gcggacatgaaagttatgaattacctgtcc

SEQ ID NO: 2546 - DNA, 30 bp, synthetic construct
  source 1..30: mol_type = other DNA
gcggacatgagcgttatgaattacctgtcc

SEQ ID NO: 2547 - DNA, 30 bp, synthetic construct
  source 1..30: mol_type = other DNA
gcggacatgcgtgttatgaattacctgtcc

SEQ ID NO: 2548 - DNA, 30 bp, synthetic construct
  source 1..30: mol_type = other DNA
gcggacatgctggttatgaattacctgtcc

SEQ ID NO: 2549 - DNA, 30 bp, synthetic construct
  source 1..30: mol_type = other DNA
gcggacatgccggttatgaattacctgtcc

SEQ ID NO: 2550 - DNA, 30 bp, synthetic construct
  source 1..30: mol_type = other DNA
gcggacatgcatgttatgaattacctgtcc

SEQ ID NO: 2551 - DNA, 30 bp, synthetic construct
  source 1..30: mol_type = other DNA
gcggacatgcaggttatgaattacctgtcc

SEQ ID NO: 2552 - DNA, 30 bp, synthetic construct
  source 1..30: mol_type = other DNA
gcggacatggtggttatgaattacctgtcc

SEQ ID NO: 2553 - DNA, 30 bp, synthetic construct
  source 1..30: mol_type = other DNA
gcggacatggcggttatgaattacctgtcc

SEQ ID NO: 2554 - DNA, 30 bp, synthetic construct
  source 1..30: mol_type = other DNA
gcggacatggatgttatgaattacctgtcc

SEQ ID NO: 2555 - DNA, 30 bp, synthetic construct
  source 1..30: mol_type = other DNA
gcggacatggaagttatgaattacctgtcc

SEQ ID NO: 2556 - DNA, 30 bp, synthetic construct
  source 1..30: mol_type = other DNA
gcggacatgggcgttatgaattacctgtcc

SEQ ID NO: 2557 - DNA, 30 bp, synthetic construct
  source 1..30: mol_type = other DNA
gcggacatgtttgttatgaattacctgtcc

SEQ ID NO: 2558 - DNA, 30 bp, synthetic construct
  source 1..30: mol_type = other DNA
gcggacatgtatgttatgaattacctgtcc

SEQ ID NO: 2559 - DNA, 30 bp, synthetic construct
  source 1..30: mol_type = other DNA
gcggacatgtgcgttatgaattacctgtcc

SEQ ID NO: 2560 - DNA, 30 bp, synthetic construct
  source 1..30: mol_type = other DNA
gcggacatgtgggttatgaattacctgtcc

SEQ ID NO: 2561 - DNA, 30 bp, synthetic construct
  source 1..30: mol_type = other DNA
gcggacatgatcattatgaattacctgtcc

SEQ ID NO: 2562 - DNA, 30 bp, synthetic construct
  source 1..30: mol_type = other DNA
gcggacatgatcatgatgaattacctgtcc

SEQ ID NO: 2563 - DNA, 30 bp, synthetic construct
  source 1..30: mol_type = other DNA
gcggacatgatcaccatgaattacctgtcc

SEQ ID NO: 2564 - DNA, 30 bp, synthetic construct
  source 1..30: mol_type = other DNA
gcggacatgatcaacatgaattacctgtcc

SEQ ID NO: 2565 - DNA, 30 bp, synthetic construct
  source 1..30: mol_type = other DNA
gcggacatgatcaaaatgaattacctgtcc

SEQ ID NO: 2566 - DNA, 30 bp, synthetic construct
  source 1..30: mol_type = other DNA
gcggacatgatcagcatgaattacctgtcc

SEQ ID NO: 2567 - DNA, 30 bp, synthetic construct
  source 1..30: mol_type = other DNA
gcggacatgatccgtatgaattacctgtcc

SEQ ID NO: 2568 - DNA, 30 bp, synthetic construct
  source 1..30: mol_type = other DNA
gcggacatgatcctgatgaattacctgtcc

SEQ ID NO: 2569 - DNA, 30 bp, synthetic construct
  source 1..30: mol_type = other DNA
gcggacatgatcccgatgaattacctgtcc

SEQ ID NO: 2570 - DNA, 30 bp, synthetic construct
  source 1..30: mol_type = other DNA
gcggacatgatccatatgaattacctgtcc

SEQ ID NO: 2571 - DNA, 30 bp, synthetic construct
  source 1..30: mol_type = other DNA
gcggacatgatccagatgaattacctgtcc

SEQ ID NO: 2572 - DNA, 30 bp, synthetic construct
  source 1..30: mol_type = other DNA
gcggacatgatcgcgatgaattacctgtcc

SEQ ID NO: 2573 - DNA, 30 bp, synthetic construct
  source 1..30: mol_type = other DNA
gcggacatgatcgatatgaattacctgtcc

SEQ ID NO: 2574 - DNA, 30 bp, synthetic construct
  source 1..30: mol_type = other DNA
gcggacatgatcgaaatgaattacctgtcc

SEQ ID NO: 2575 - DNA, 30 bp, synthetic construct
  source 1..30: mol_type = other DNA
gcggacatgatcggcatgaattacctgtcc

SEQ ID NO: 2576 - DNA, 30 bp, synthetic construct
  source 1..30: mol_type = other DNA
gcggacatgatctttatgaattacctgtcc

SEQ ID NO: 2577 - DNA, 30 bp, synthetic construct
  source 1..30: mol_type = other DNA
gcggacatgatctatatgaattacctgtcc

SEQ ID NO: 2578 - DNA, 30 bp, synthetic construct
  source 1..30: mol_type = other DNA
gcggacatgatctgcatgaattacctgtcc

SEQ ID NO: 2579 - DNA, 30 bp, synthetic construct
  source 1..30: mol_type = other DNA
gcggacatgatctggatgaattacctgtcc

SEQ ID NO: 2580 - DNA, 30 bp, synthetic construct
  source 1..30: mol_type = other DNA
gcggacatgatcgttattaattacctgtcc

SEQ ID NO: 2581 - DNA, 30 bp, synthetic construct
  source 1..30: mol_type = other DNA
gcggacatgatcgttaccaattacctgtcc

SEQ ID NO: 2582 - DNA, 30 bp, synthetic construct
  source 1..30: mol_type = other DNA
gcggacatgatcgttaacaattacctgtcc

SEQ ID NO: 2583 - DNA, 30 bp, synthetic construct
  source 1..30: mol_type = other DNA
gcggacatgatcgttaaaaattacctgtcc

SEQ ID NO: 2584 - DNA, 30 bp, synthetic construct
  source 1..30: mol_type = other DNA
gcggacatgatcgttagcaattacctgtcc

SEQ ID NO: 2585 - DNA, 30 bp, synthetic construct
  source 1..30: mol_type = other DNA
gcggacatgatcgttcgtaattacctgtcc

SEQ ID NO: 2586 - DNA, 30 bp, synthetic construct
  source 1..30: mol_type = other DNA
gcggacatgatcgttctgaattacctgtcc

SEQ ID NO: 2587 - DNA, 30 bp, synthetic construct
  source 1..30: mol_type = other DNA
gcggacatgatcgttccgaattacctgtcc

SEQ ID NO: 2588 - DNA, 30 bp, synthetic construct
  source 1..30: mol_type = other DNA
gcggacatgatcgttcataattacctgtcc

SEQ ID NO: 2589 - DNA, 30 bp, synthetic construct
  source 1..30: mol_type = other DNA
gcggacatgatcgttcagaattacctgtcc

SEQ ID NO: 2590 - DNA, 30 bp, synthetic construct
  source 1..30: mol_type = other DNA
gcggacatgatcgttgtgaattacctgtcc

SEQ ID NO: 2591 - DNA, 30 bp, synthetic construct
  source 1..30: mol_type = other DNA
gcggacatgatcgttgcgaattacctgtcc

SEQ ID NO: 2592 - DNA, 30 bp, synthetic construct
  source 1..30: mol_type = other DNA
gcggacatgatcgttgataattacctgtcc

SEQ ID NO: 2593 - DNA, 30 bp, synthetic construct
  source 1..30: mol_type = other DNA
gcggacatgatcgttgaaaattacctgtcc

SEQ ID NO: 2594 - DNA, 30 bp, synthetic construct
  source 1..30: mol_type = other DNA
gcggacatgatcgttggcaattacctgtcc

SEQ ID NO: 2595 - DNA, 30 bp, synthetic construct
  source 1..30: mol_type = other DNA
gcggacatgatcgtttttaattacctgtcc

SEQ ID NO: 2596 - DNA, 30 bp, synthetic construct
  source 1..30: mol_type = other DNA
gcggacatgatcgtttataattacctgtcc

SEQ ID NO: 2597 - DNA, 30 bp, synthetic construct
  source 1..30: mol_type = other DNA
gcggacatgatcgtttgcaattacctgtcc

SEQ ID NO: 2598 - DNA, 30 bp, synthetic construct
  source 1..30: mol_type = other DNA
gcggacatgatcgtttggaattacctgtcc

SEQ ID NO: 2599 - DNA, 30 bp, synthetic construct
  source 1..30: mol_type = other DNA
gcggacatgatcgttatgatttacctgtcc

SEQ ID NO: 2600 - DNA, 30 bp, synthetic construct
  source 1..30: mol_type = other DNA
gcggacatgatcgttatgatgtacctgtcc

SEQ ID NO: 2601 - DNA, 30 bp, synthetic construct
  source 1..30: mol_type = other DNA
gcggacatgatcgttatgacctacctgtcc

SEQ ID NO: 2602 - DNA, 30 bp, synthetic construct
  source 1..30: mol_type = other DNA
gcggacatgatcgttatgaaatacctgtcc

SEQ ID NO: 2603 - DNA, 30 bp, synthetic construct
  source 1..30: mol_type = other DNA
gcggacatgatcgttatgagctacctgtcc

SEQ ID NO: 2604 - DNA, 30 bp, synthetic construct
  source 1..30: mol_type = other DNA
gcggacatgatcgttatgcgttacctgtcc

SEQ ID NO: 2605 - DNA, 30 bp, synthetic construct
  source 1..30: mol_type = other DNA
gcggacatgatcgttatgctgtacctgtcc

SEQ ID NO: 2606 - DNA, 30 bp, synthetic construct
  source 1..30: mol_type = other DNA
gcggacatgatcgttatgccgtacctgtcc

SEQ ID NO: 2607 - DNA, 30 bp, synthetic construct
  source 1..30: mol_type = other DNA
gcggacatgatcgttatgcattacctgtcc

SEQ ID NO: 2608 - DNA, 30 bp, synthetic construct
  source 1..30: mol_type = other DNA
gcggacatgatcgttatgcagtacctgtcc

SEQ ID NO: 2609 - DNA, 30 bp, synthetic construct
  source 1..30: mol_type = other DNA
gcggacatgatcgttatggtgtacctgtcc

SEQ ID NO: 2610 - DNA, 30 bp, synthetic construct
  source 1..30: mol_type = other DNA
gcggacatgatcgttatggcgtacctgtcc

SEQ ID NO: 2611 - DNA, 30 bp, synthetic construct
  source 1..30: mol_type = other DNA
gcggacatgatcgttatggattacctgtcc

SEQ ID NO: 2612 - DNA, 30 bp, synthetic construct
  source 1..30: mol_type = other DNA
gcggacatgatcgttatggaatacctgtcc

SEQ ID NO: 2613 - DNA, 30 bp, synthetic construct
  source 1..30: mol_type = other DNA
gcggacatgatcgttatgggctacctgtcc

SEQ ID NO: 2614 - DNA, 30 bp, synthetic construct
  source 1..30: mol_type = other DNA
gcggacatgatcgttatgttttacctgtcc

SEQ ID NO: 2615 - DNA, 30 bp, synthetic construct
  source 1..30: mol_type = other DNA
gcggacatgatcgttatgtattacctgtcc

SEQ ID NO: 2616 - DNA, 30 bp, synthetic construct
  source 1..30: mol_type = other DNA
gcggacatgatcgttatgtgctacctgtcc

SEQ ID NO: 2617 - DNA, 30 bp, synthetic construct
  source 1..30: mol_type = other DNA
gcggacatgatcgttatgtggtacctgtcc

SEQ ID NO: 2618 - DNA, 30 bp, synthetic construct
  source 1..30: mol_type = other DNA
gcggacatgatcgttatgaatattctgtcc

SEQ ID NO: 2619 - DNA, 30 bp, synthetic construct
  source 1..30: mol_type = other DNA
gcggacatgatcgttatgaatatgctgtcc

SEQ ID NO: 2620 - DNA, 30 bp, synthetic construct
  source 1..30: mol_type = other DNA
gcggacatgatcgttatgaataccctgtcc

SEQ ID NO: 2621 - DNA, 30 bp, synthetic construct
  source 1..30: mol_type = other DNA
gcggacatgatcgttatgaataacctgtcc

SEQ ID NO: 2622 - DNA, 30 bp, synthetic construct
  source 1..30: mol_type = other DNA
gcggacatgatcgttatgaataaactgtcc

SEQ ID NO: 2623 - DNA, 30 bp, synthetic construct
  source 1..30: mol_type = other DNA
gcggacatgatcgttatgaatagcctgtcc

SEQ ID NO: 2624 - DNA, 30 bp, synthetic construct
  source 1..30: mol_type = other DNA
gcggacatgatcgttatgaatcgtctgtcc

SEQ ID NO: 2625 - DNA, 30 bp, synthetic construct
  source 1..30: mol_type = other DNA
gcggacatgatcgttatgaatctgctgtcc

SEQ ID NO: 2626 - DNA, 30 bp, synthetic construct
  source 1..30: mol_type = other DNA
gcggacatgatcgttatgaatccgctgtcc

SEQ ID NO: 2627 - DNA, 30 bp, synthetic construct
  source 1..30: mol_type = other DNA
gcggacatgatcgttatgaatcatctgtcc

SEQ ID NO: 2628 - DNA, 30 bp, synthetic construct
  source 1..30: mol_type = other DNA
gcggacatgatcgttatgaatcagctgtcc

SEQ ID NO: 2629 - DNA, 30 bp, synthetic construct
  source 1..30: mol_type = other DNA
gcggacatgatcgttatgaatgtgctgtcc

SEQ ID NO: 2630 - DNA, 30 bp, synthetic construct
  source 1..30: mol_type = other DNA
gcggacatgatcgttatgaatgcgctgtcc

SEQ ID NO: 2631 - DNA, 30 bp, synthetic construct
  source 1..30: mol_type = other DNA
gcggacatgatcgttatgaatgatctgtcc

SEQ ID NO: 2632 - DNA, 30 bp, synthetic construct
  source 1..30: mol_type = other DNA
gcggacatgatcgttatgaatgaactgtcc

SEQ ID NO: 2633 - DNA, 30 bp, synthetic construct
  source 1..30: mol_type = other DNA
gcggacatgatcgttatgaatggcctgtcc

SEQ ID NO: 2634 - DNA, 30 bp, synthetic construct
  source 1..30: mol_type = other DNA
gcggacatgatcgttatgaattttctgtcc

SEQ ID NO: 2635 - DNA, 30 bp, synthetic construct
  source 1..30: mol_type = other DNA
gcggacatgatcgttatgaattgcctgtcc

SEQ ID NO: 2636 - DNA, 30 bp, synthetic construct
  source 1..30: mol_type = other DNA
gcggacatgatcgttatgaattggctgtcc

SEQ ID NO: 2637 - DNA, 30 bp, synthetic construct
  source 1..30: mol_type = other DNA
gcggacatgatcgttatgaattacatttcc

SEQ ID NO: 2638 - DNA, 30 bp, synthetic construct
  source 1..30: mol_type = other DNA
gcggacatgatcgttatgaattacatgtcc

SEQ ID NO: 2639 - DNA, 30 bp, synthetic construct
  source 1..30: mol_type = other DNA
gcggacatgatcgttatgaattacacctcc

SEQ ID NO: 2640 - DNA, 30 bp, synthetic construct
  source 1..30: mol_type = other DNA
gcggacatgatcgttatgaattacaactcc

SEQ ID NO: 2641 - DNA, 30 bp, synthetic construct
  source 1..30: mol_type = other DNA
gcggacatgatcgttatgaattacaaatcc

SEQ ID NO: 2642 - DNA, 30 bp, synthetic construct
  source 1..30: mol_type = other DNA
gcggacatgatcgttatgaattacagctcc

SEQ ID NO: 2643 - DNA, 30 bp, synthetic construct
  source 1..30: mol_type = other DNA
gcggacatgatcgttatgaattaccgttcc

SEQ ID NO: 2644 - DNA, 30 bp, synthetic construct
  source 1..30: mol_type = other DNA
gcggacatgatcgttatgaattacccgtcc

SEQ ID NO: 2645 - DNA, 30 bp, synthetic construct
  source 1..30: mol_type = other DNA
gcggacatgatcgttatgaattaccattcc

SEQ ID NO: 2646 - DNA, 30 bp, synthetic construct
  source 1..30: mol_type = other DNA
gcggacatgatcgttatgaattaccagtcc

SEQ ID NO: 2647 - DNA, 30 bp, synthetic construct
  source 1..30: mol_type = other DNA
gcggacatgatcgttatgaattacgtgtcc

SEQ ID NO: 2648 - DNA, 30 bp, synthetic construct
  source 1..30: mol_type = other DNA
gcggacatgatcgttatgaattacgcgtcc

SEQ ID NO: 2649 - DNA, 30 bp, synthetic construct
  source 1..30: mol_type = other DNA
gcggacatgatcgttatgaattacgattcc

SEQ ID NO: 2650 - DNA, 30 bp, synthetic construct
  source 1..30: mol_type = other DNA
gcggacatgatcgttatgaattacgaatcc

SEQ ID NO: 2651 - DNA, 30 bp, synthetic construct
  source 1..30: mol_type = other DNA
gcggacatgatcgttatgaattacggctcc

SEQ ID NO: 2652 - DNA, 30 bp, synthetic construct
  source 1..30: mol_type = other DNA
gcggacatgatcgttatgaattacttttcc

SEQ ID NO: 2653 - DNA, 30 bp, synthetic construct
  source 1..30: mol_type = other DNA
gcggacatgatcgttatgaattactattcc

SEQ ID NO: 2654 - DNA, 30 bp, synthetic construct
  source 1..30: mol_type = other DNA
gcggacatgatcgttatgaattactgctcc

SEQ ID NO: 2655 - DNA, 30 bp, synthetic construct
  source 1..30: mol_type = other DNA
gcggacatgatcgttatgaattactggtcc

SEQ ID NO: 2656 - DNA, 30 bp, synthetic construct
  source 1..30: mol_type = other DNA
gcggacatgatcgttatgaattacctgatt

SEQ ID NO: 2657 - DNA, 30 bp, synthetic construct
  source 1..30: mol_type = other DNA
gcggacatgatcgttatgaattacctgatg

SEQ ID NO: 2658 - DNA, 30 bp, synthetic construct
  source 1..30: mol_type = other DNA
gcggacatgatcgttatgaattacctgacc

SEQ ID NO: 2659 - DNA, 30 bp, synthetic construct
  source 1..30: mol_type = other DNA
gcggacatgatcgttatgaattacctgaac

SEQ ID NO: 2660 - DNA, 30 bp, synthetic construct
  source 1..30: mol_type = other DNA
gcggacatgatcgttatgaattacctgaaa

SEQ ID NO: 2661 - DNA, 30 bp, synthetic construct
  source 1..30: mol_type = other DNA
gcggacatgatcgttatgaattacctgcgt

SEQ ID NO: 2662 - DNA, 30 bp, synthetic construct
  source 1..30: mol_type = other DNA
gcggacatgatcgttatgaattacctgctg

SEQ ID NO: 2663 - DNA, 30 bp, synthetic construct
  source 1..30: mol_type = other DNA
gcggacatgatcgttatgaattacctgccg

SEQ ID NO: 2664 - DNA, 30 bp, synthetic construct
  source 1..30: mol_type = other DNA
gcggacatgatcgttatgaattacctgcat

SEQ ID NO: 2665 - DNA, 30 bp, synthetic construct
  source 1..30: mol_type = other DNA
gcggacatgatcgttatgaattacctgcag

SEQ ID NO: 2666 - DNA, 30 bp, synthetic construct
  source 1..30: mol_type = other DNA
gcggacatgatcgttatgaattacctggtg

SEQ ID NO: 2667 - DNA, 30 bp, synthetic construct
  source 1..30: mol_type = other DNA
gcggacatgatcgttatgaattacctggcg

SEQ ID NO: 2668 - DNA, 30 bp, synthetic construct
  source 1..30: mol_type = other DNA
gcggacatgatcgttatgaattacctggat

SEQ ID NO: 2669 - DNA, 30 bp, synthetic construct
  source 1..30: mol_type = other DNA
gcggacatgatcgttatgaattacctggaa

SEQ ID NO: 2670 - DNA, 30 bp, synthetic construct
  source 1..30: mol_type = other DNA
gcggacatgatcgttatgaattacctgggc

SEQ ID NO: 2671 - DNA, 30 bp, synthetic construct
  source 1..30: mol_type = other DNA
gcggacatgatcgttatgaattacctgttt

SEQ ID NO: 2672 - DNA, 30 bp, synthetic construct
  source 1..30: mol_type = other DNA
gcggacatgatcgttatgaattacctgtat

SEQ ID NO: 2673 - DNA, 30 bp, synthetic construct
  source 1..30: mol_type = other DNA
gcggacatgatcgttatgaattacctgtgc

SEQ ID NO: 2674 - DNA, 30 bp, synthetic construct
  source 1..30: mol_type = other DNA
gcggacatgatcgttatgaattacctgtgg

SEQ ID NO: 2675 - DNA, 30 bp, Bacillus subtilis
  source 1..30: mol_type = genomic DNA
cgtctggatggcgctcgtaatgtacagatc

SEQ ID NO: 2676 - DNA, 30 bp, synthetic construct
  source 1..30: mol_type = other DNA
attctggatggcgctcgtaatgtacagatc

SEQ ID NO: 2677 - DNA, 30 bp, synthetic construct
  source 1..30: mol_type = other DNA
atgctggatggcgctcgtaatgtacagatc

SEQ ID NO: 2678 - DNA, 30 bp, synthetic construct
  source 1..30: mol_type = other DNA
accctggatggcgctcgtaatgtacagatc

SEQ ID NO: 2679 - DNA, 30 bp, synthetic construct
  source 1..30: mol_type = other DNA
aacctggatggcgctcgtaatgtacagatc

SEQ ID NO: 2680 - DNA, 30 bp, synthetic construct
  source 1..30: mol_type = other DNA
aaactggatggcgctcgtaatgtacagatc

SEQ ID NO: 2681 - DNA, 30 bp, synthetic construct
  source 1..30: mol_type = other DNA
agcctggatggcgctcgtaatgtacagatc

SEQ ID NO: 2682 - DNA, 30 bp, synthetic construct
  source 1..30: mol_type = other DNA
ctgctggatggcgctcgtaatgtacagatc

SEQ ID NO: 2683 - DNA, 30 bp, synthetic construct
  source 1..30: mol_type = other DNA
ccgctggatggcgctcgtaatgtacagatc

SEQ ID NO: 2684 - DNA, 30 bp, synthetic construct
  source 1..30: mol_type = other DNA
catctggatggcgctcgtaatgtacagatc

SEQ ID NO: 2685 - DNA, 30 bp, synthetic construct
  source 1..30: mol_type = other DNA
cagctggatggcgctcgtaatgtacagatc

SEQ ID NO: 2686 - DNA, 30 bp, synthetic construct
  source 1..30: mol_type = other DNA
gtgctggatggcgctcgtaatgtacagatc

SEQ ID NO: 2687 - DNA, 30 bp, synthetic construct
  source 1..30: mol_type = other DNA
gcgctggatggcgctcgtaatgtacagatc

SEQ ID NO: 2688 - DNA, 30 bp, synthetic construct
  source 1..30: mol_type = other DNA
gatctggatggcgctcgtaatgtacagatc

SEQ ID NO: 2689 - DNA, 30 bp, synthetic construct
  source 1..30: mol_type = other DNA
gaactggatggcgctcgtaatgtacagatc

SEQ ID NO: 2690 - DNA, 30 bp, synthetic construct
  source 1..30: mol_type = other DNA
ggcctggatggcgctcgtaatgtacagatc

SEQ ID NO: 2691 - DNA, 30 bp, synthetic construct
  source 1..30: mol_type = other DNA
tttctggatggcgctcgtaatgtacagatc

SEQ ID NO: 2692 - DNA, 30 bp, synthetic construct
  source 1..30: mol_type = other DNA
tatctggatggcgctcgtaatgtacagatc

SEQ ID NO: 2693 - DNA, 30 bp, synthetic construct
  source 1..30: mol_type = other DNA
tgcctggatggcgctcgtaatgtacagatc

SEQ ID NO: 2694 - DNA, 30 bp, synthetic construct
  source 1..30: mol_type = other DNA
tggctggatggcgctcgtaatgtacagatc

SEQ ID NO: 2695 - DNA, 30 bp, synthetic construct
  source 1..30: mol_type = other DNA
cgtattgatggcgctcgtaatgtacagatc

SEQ ID NO: 2696 - DNA, 30 bp, synthetic construct
  source 1..30: mol_type = other DNA
cgtatggatggcgctcgtaatgtacagatc

SEQ ID NO: 2697 - DNA, 30 bp, synthetic construct
  source 1..30: mol_type = other DNA
cgtaccgatggcgctcgtaatgtacagatc

SEQ ID NO: 2698 - DNA, 30 bp, synthetic construct
  source 1..30: mol_type = other DNA
cgtaacgatggcgctcgtaatgtacagatc

SEQ ID NO: 2699 - DNA, 30 bp, synthetic construct
  source 1..30: mol_type = other DNA
cgtaaagatggcgctcgtaatgtacagatc

SEQ ID NO: 2700 - DNA, 30 bp, synthetic construct
  source 1..30: mol_type = other DNA
cgtagcgatggcgctcgtaatgtacagatc

SEQ ID NO: 2701 - DNA, 30 bp, synthetic construct
  source 1..30: mol_type = other DNA
cgtcgtgatggcgctcgtaatgtacagatc

SEQ ID NO: 2702 - DNA, 30 bp, synthetic construct
  source 1..30: mol_type = other DNA
cgtccggatggcgctcgtaatgtacagatc

SEQ ID NO: 2703 - DNA, 30 bp, synthetic construct
  source 1..30: mol_type = other DNA
cgtcatgatggcgctcgtaatgtacagatc

SEQ ID NO: 2704 - DNA, 30 bp, synthetic construct
  source 1..30: mol_type = other DNA
cgtcaggatggcgctcgtaatgtacagatc

SEQ ID NO: 2705 - DNA, 30 bp, synthetic construct
  source 1..30: mol_type = other DNA
cgtgtggatggcgctcgtaatgtacagatc

SEQ ID NO: 2706 - DNA, 30 bp, synthetic construct
  source 1..30: mol_type = other DNA
cgtgcggatggcgctcgtaatgtacagatc

SEQ ID NO: 2707 - DNA, 30 bp, synthetic construct
  source 1..30: mol_type = other DNA
cgtgatgatggcgctcgtaatgtacagatc

SEQ ID NO: 2708 - DNA, 30 bp, synthetic construct
  source 1..30: mol_type = other DNA
cgtgaagatggcgctcgtaatgtacagatc

SEQ ID NO: 2709 - DNA, 30 bp, synthetic construct
  source 1..30: mol_type = other DNA
cgtggcgatggcgctcgtaatgtacagatc

SEQ ID NO: 2710 - DNA, 30 bp, synthetic construct
  source 1..30: mol_type = other DNA
cgttttgatggcgctcgtaatgtacagatc

SEQ ID NO: 2711 - DNA, 30 bp, synthetic construct
  source 1..30: mol_type = other DNA
cgttatgatggcgctcgtaatgtacagatc

SEQ ID NO: 2712 - DNA, 30 bp, synthetic construct
  source 1..30: mol_type = other DNA
cgttgcgatggcgctcgtaatgtacagatc

SEQ ID NO: 2713 - DNA, 30 bp, synthetic construct
  source 1..30: mol_type = other DNA
cgttgggatggcgctcgtaatgtacagatc

SEQ ID NO: 2714 - DNA, 30 bp, synthetic construct
  source 1..30: mol_type = other DNA
cgtctgattggcgctcgtaatgtacagatc

SEQ ID NO: 2715 - DNA, 30 bp, synthetic construct
  source 1..30: mol_type = other DNA
cgtctgatgggcgctcgtaatgtacagatc

SEQ ID NO: 2716 - DNA, 30 bp, synthetic construct
  source 1..30: mol_type = other DNA
cgtctgaccggcgctcgtaatgtacagatc

SEQ ID NO: 2717 - DNA, 30 bp, synthetic construct
  source 1..30: mol_type = other DNA
cgtctgaacggcgctcgtaatgtacagatc

SEQ ID NO: 2718 - DNA, 30 bp, synthetic construct
  source 1..30: mol_type = other DNA
cgtctgaaaggcgctcgtaatgtacagatc

SEQ ID NO: 2719 - DNA, 30 bp, synthetic construct
  source 1..30: mol_type = other DNA
cgtctgagcggcgctcgtaatgtacagatc

SEQ ID NO: 2720 - DNA, 30 bp, synthetic construct
  source 1..30: mol_type = other DNA
cgtctgcgtggcgctcgtaatgtacagatc

SEQ ID NO: 2721 - DNA, 30 bp, synthetic construct
  source 1..30: mol_type = other DNA
cgtctgctgggcgctcgtaatgtacagatc

SEQ ID NO: 2722 - DNA, 30 bp, synthetic construct
  source 1..30: mol_type = other DNA
cgtctgccgggcgctcgtaatgtacagatc

SEQ ID NO: 2723 - DNA, 30 bp, synthetic construct
  source 1..30: mol_type = other DNA
cgtctgcatggcgctcgtaatgtacagatc

SEQ ID NO: 2724 - DNA, 30 bp, synthetic construct
  source 1..30: mol_type = other DNA
cgtctgcagggcgctcgtaatgtacagatc

SEQ ID NO: 2725 - DNA, 30 bp, synthetic construct
  source 1..30: mol_type = other DNA
cgtctggtgggcgctcgtaatgtacagatc

SEQ ID NO: 2726 - DNA, 30 bp, synthetic construct
  source 1..30: mol_type = other DNA
cgtctggcgggcgctcgtaatgtacagatc

SEQ ID NO: 2727 - DNA, 30 bp, synthetic construct
  source 1..30: mol_type = other DNA
cgtctggaaggcgctcgtaatgtacagatc

SEQ ID NO: 2728 - DNA, 30 bp, synthetic construct
  source 1..30: mol_type = other DNA
cgtctgggcggcgctcgtaatgtacagatc

SEQ ID NO: 2729 - DNA, 30 bp, synthetic construct
  source 1..30: mol_type = other DNA
cgtctgtttggcgctcgtaatgtacagatc

SEQ ID NO: 2730 - DNA, 30 bp, synthetic construct
  source 1..30: mol_type = other DNA
cgtctgtatggcgctcgtaatgtacagatc

SEQ ID NO: 2731 - DNA, 30 bp, synthetic construct
  source 1..30: mol_type = other DNA
cgtctgtgcggcgctcgtaatgtacagatc

SEQ ID NO: 2732 - DNA, 30 bp, synthetic construct
  source 1..30: mol_type = other DNA
cgtctgtggggcgctcgtaatgtacagatc

SEQ ID NO: 2733 - DNA, 30 bp, synthetic construct
  source 1..30: mol_type = other DNA
cgtctggatattgctcgtaatgtacagatc

SEQ ID NO: 2734 - DNA, 30 bp, synthetic construct
  source 1..30: mol_type = other DNA
cgtctggatatggctcgtaatgtacagatc

SEQ ID NO: 2735 - DNA, 30 bp, synthetic construct
  source 1..30: mol_type = other DNA
cgtctggataccgctcgtaatgtacagatc

SEQ ID NO: 2736 - DNA, 30 bp, synthetic construct
  source 1..30: mol_type = other DNA
cgtctggataacgctcgtaatgtacagatc

SEQ ID NO: 2737 - DNA, 30 bp, synthetic construct
  source 1..30: mol_type = other DNA
cgtctggataaagctcgtaatgtacagatc

SEQ ID NO: 2738 - DNA, 30 bp, synthetic construct
  source 1..30: mol_type = other DNA
cgtctggatagcgctcgtaatgtacagatc

SEQ ID NO: 2739 - DNA, 30 bp, synthetic construct
  source 1..30: mol_type = other DNA
cgtctggatcgtgctcgtaatgtacagatc

SEQ ID NO: 2740 - DNA, 30 bp, synthetic construct
  source 1..30: mol_type = other DNA
cgtctggatctggctcgtaatgtacagatc

SEQ ID NO: 2741 - DNA, 30 bp, synthetic construct
  source 1..30: mol_type = other DNA
cgtctggatccggctcgtaatgtacagatc

SEQ ID NO: 2742 - DNA, 30 bp, synthetic construct
  source 1..30: mol_type = other DNA
cgtctggatcatgctcgtaatgtacagatc

SEQ ID NO: 2743 - DNA, 30 bp, synthetic construct
  source 1..30: mol_type = other DNA
cgtctggatcaggctcgtaatgtacagatc

SEQ ID NO: 2744 - DNA, 30 bp, synthetic construct
  source 1..30: mol_type = other DNA
cgtctggatgtggctcgtaatgtacagatc

SEQ ID NO: 2745 - DNA, 30 bp, synthetic construct
  source 1..30: mol_type = other DNA
cgtctggatgcggctcgtaatgtacagatc

SEQ ID NO: 2746 - DNA, 30 bp, synthetic construct
  source 1..30: mol_type = other DNA
cgtctggatgatgctcgtaatgtacagatc

SEQ ID NO: 2747 - DNA, 30 bp, synthetic construct
  source 1..30: mol_type = other DNA
cgtctggatgaagctcgtaatgtacagatc

SEQ ID NO: 2748 - DNA, 30 bp, synthetic construct
  source 1..30: mol_type = other DNA
cgtctggattttgctcgtaatgtacagatc

SEQ ID NO: 2749 - DNA, 30 bp, synthetic construct
  source 1..30: mol_type = other DNA
cgtctggattatgctcgtaatgtacagatc

SEQ ID NO: 2750 - DNA, 30 bp, synthetic construct
  source 1..30: mol_type = other DNA
cgtctggattgcgctcgtaatgtacagatc

SEQ ID NO: 2751 - DNA, 30 bp, synthetic construct
  source 1..30: mol_type = other DNA
cgtctggattgggctcgtaatgtacagatc

SEQ ID NO: 2752 - DNA, 30 bp, synthetic construct
  source 1..30: mol_type = other DNA
cgtctggatggcattcgtaatgtacagatc

SEQ ID NO: 2753 - DNA, 30 bp, synthetic construct
  source 1..30: mol_type = other DNA
cgtctggatggcatgcgtaatgtacagatc

SEQ ID NO: 2754 - DNA, 30 bp, synthetic construct
  source 1..30: mol_type = other DNA
cgtctggatggcacccgtaatgtacagatc

SEQ ID NO: 2755 - DNA, 30 bp, synthetic construct
  source 1..30: mol_type = other DNA
cgtctggatggcaaccgtaatgtacagatc

SEQ ID NO: 2756 - DNA, 30 bp, synthetic construct
  source 1..30: mol_type = other DNA
cgtctggatggcaaacgtaatgtacagatc

SEQ ID NO: 2757 - DNA, 30 bp, synthetic construct
  source 1..30: mol_type = other DNA
cgtctggatggcagccgtaatgtacagatc

SEQ ID NO: 2758 - DNA, 30 bp, synthetic construct
  source 1..30: mol_type = other DNA
cgtctggatggccgtcgtaatgtacagatc

SEQ ID NO: 2759 - DNA, 30 bp, synthetic construct
  source 1..30: mol_type = other DNA
cgtctggatggcctgcgtaatgtacagatc

SEQ ID NO: 2760 - DNA, 30 bp, synthetic construct
  source 1..30: mol_type = other DNA
cgtctggatggcccgcgtaatgtacagatc

SEQ ID NO: 2761 - DNA, 30 bp, synthetic construct
  source 1..30: mol_type = other DNA
cgtctggatggccatcgtaatgtacagatc

SEQ ID NO: 2762 - DNA, 30 bp, synthetic construct
  source 1..30: mol_type = other DNA
cgtctggatggccagcgtaatgtacagatc

SEQ ID NO: 2763 - DNA, 30 bp, synthetic construct
  source 1..30: mol_type = other DNA
cgtctggatggcgtgcgtaatgtacagatc

SEQ ID NO: 2764 - DNA, 30 bp, synthetic construct
  source 1..30: mol_type = other DNA
cgtctggatggcgatcgtaatgtacagatc

SEQ ID NO: 2765 - DNA, 30 bp, synthetic construct
  source 1..30: mol_type = other DNA
cgtctggatggcgaacgtaatgtacagatc

SEQ ID NO: 2766 - DNA, 30 bp, synthetic construct
  source 1..30: mol_type = other DNA
cgtctggatggcggccgtaatgtacagatc

SEQ ID NO: 2767 - DNA, 30 bp, synthetic construct
  source 1..30: mol_type = other DNA
cgtctggatggctttcgtaatgtacagatc

SEQ ID NO: 2768 - DNA, 30 bp, synthetic construct
  source 1..30: mol_type = other DNA
cgtctggatggctatcgtaatgtacagatc

SEQ ID NO: 2769 - DNA, 30 bp, synthetic construct
  source 1..30: mol_type = other DNA
cgtctggatggctgccgtaatgtacagatc

SEQ ID NO: 2770 - DNA, 30 bp, synthetic construct
  source 1..30: mol_type = other DNA
cgtctggatggctggcgtaatgtacagatc

SEQ ID NO: 2771 - DNA, 30 bp, synthetic construct
  source 1..30: mol_type = other DNA
cgtctggatggcgctattaatgtacagatc

SEQ ID NO: 2772 - DNA, 30 bp, synthetic construct
  source 1..30: mol_type = other DNA
cgtctggatggcgctatgaatgtacagatc

SEQ ID NO: 2773 - DNA, 30 bp, synthetic construct
  source 1..30: mol_type = other DNA
cgtctggatggcgctaccaatgtacagatc

SEQ ID NO: 2774 - DNA, 30 bp, synthetic construct
  source 1..30: mol_type = other DNA
cgtctggatggcgctaacaatgtacagatc

SEQ ID NO: 2775 - DNA, 30 bp, synthetic construct
  source 1..30: mol_type = other DNA
cgtctggatggcgctaaaaatgtacagatc

SEQ ID NO: 2776 - DNA, 30 bp, synthetic construct
  source 1..30: mol_type = other DNA
cgtctggatggcgctagcaatgtacagatc

SEQ ID NO: 2777 - DNA, 30 bp, synthetic construct
  source 1..30: mol_type = other DNA
cgtctggatggcgctctgaatgtacagatc

SEQ ID NO: 2778 - DNA, 30 bp, synthetic construct
  source 1..30: mol_type = other DNA
cgtctggatggcgctccgaatgtacagatc

SEQ ID NO: 2779 - DNA, 30 bp, synthetic construct
  source 1..30: mol_type = other DNA
cgtctggatggcgctcataatgtacagatc

SEQ ID NO: 2780 - DNA, 30 bp, synthetic construct
  source 1..30: mol_type = other DNA
cgtctggatggcgctcagaatgtacagatc

SEQ ID NO: 2781 - DNA, 30 bp, synthetic construct
  source 1..30: mol_type = other DNA
cgtctggatggcgctgtgaatgtacagatc

SEQ ID NO: 2782 - DNA, 30 bp, synthetic construct
  source 1..30: mol_type = other DNA
cgtctggatggcgctgcgaatgtacagatc

SEQ ID NO: 2783 - DNA, 30 bp, synthetic construct
  source 1..30: mol_type = other DNA
cgtctggatggcgctgataatgtacagatc

SEQ ID NO: 2784 - DNA, 30 bp, synthetic construct
  source 1..30: mol_type = other DNA
cgtctggatggcgctgaaaatgtacagatc

SEQ ID NO: 2785 - DNA, 30 bp, synthetic construct
  source 1..30: mol_type = other DNA
cgtctggatggcgctggcaatgtacagatc

SEQ ID NO: 2786 - DNA, 30 bp, synthetic construct
  source 1..30: mol_type = other DNA
cgtctggatggcgcttttaatgtacagatc

SEQ ID NO: 2787 - DNA, 30 bp, synthetic construct
  source 1..30: mol_type = other DNA
cgtctggatggcgcttataatgtacagatc

SEQ ID NO: 2788 - DNA, 30 bp, synthetic construct
  source 1..30: mol_type = other DNA
cgtctggatggcgcttgcaatgtacagatc

SEQ ID NO: 2789 - DNA, 30 bp, synthetic construct
  source 1..30: mol_type = other DNA
cgtctggatggcgcttggaatgtacagatc

SEQ ID NO: 2790 - DNA, 30 bp, synthetic construct
  source 1..30: mol_type = other DNA
cgtctggatggcgctcgtattgtacagatc

SEQ ID NO: 2791 - DNA, 30 bp, synthetic construct
  source 1..30: mol_type = other DNA
cgtctggatggcgctcgtatggtacagatc

SEQ ID NO: 2792 - DNA, 30 bp, synthetic construct
  source 1..30: mol_type = other DNA
cgtctggatggcgctcgtaccgtacagatc

SEQ ID NO: 2793 - DNA, 30 bp, synthetic construct
  source 1..30: mol_type = other DNA
cgtctggatggcgctcgtaaagtacagatc

SEQ ID NO: 2794 - DNA, 30 bp, synthetic construct
  source 1..30: mol_type = other DNA
cgtctggatggcgctcgtagcgtacagatc

SEQ ID NO: 2795 - DNA, 30 bp, synthetic construct
  source 1..30: mol_type = other DNA
cgtctggatggcgctcgtcgtgtacagatc

SEQ ID NO: 2796 - DNA, 30 bp, synthetic construct
  source 1..30: mol_type = other DNA
cgtctggatggcgctcgtctggtacagatc

SEQ ID NO: 2797 - DNA, 30 bp, synthetic construct
  source 1..30: mol_type = other DNA
cgtctggatggcgctcgtccggtacagatc

SEQ ID NO: 2798 - DNA, 30 bp, synthetic construct
  source 1..30: mol_type = other DNA
cgtctggatggcgctcgtcatgtacagatc

SEQ ID NO: 2799 - DNA, 30 bp, synthetic construct
  source 1..30: mol_type = other DNA
cgtctggatggcgctcgtcaggtacagatc

SEQ ID NO: 2800 - DNA, 30 bp, synthetic construct
  source 1..30: mol_type = other DNA
cgtctggatggcgctcgtgtggtacagatc

SEQ ID NO: 2801 - DNA, 30 bp, synthetic construct
  source 1..30: mol_type = other DNA
cgtctggatggcgctcgtgcggtacagatc

SEQ ID NO: 2802 - DNA, 30 bp, synthetic construct
  source 1..30: mol_type = other DNA
cgtctggatggcgctcgtgatgtacagatc

SEQ ID NO: 2803 - DNA, 30 bp, synthetic construct
  source 1..30: mol_type = other DNA
cgtctggatggcgctcgtgaagtacagatc

SEQ ID NO: 2804 - DNA, 30 bp, synthetic construct
  source 1..30: mol_type = other DNA
cgtctggatggcgctcgtggcgtacagatc

SEQ ID NO: 2805 - DNA, 30 bp, synthetic construct
  source 1..30: mol_type = other DNA
cgtctggatggcgctcgttttgtacagatc

SEQ ID NO: 2806 - DNA, 30 bp, synthetic construct
  source 1..30: mol_type = other DNA
cgtctggatggcgctcgttatgtacagatc

SEQ ID NO: 2807 - DNA, 30 bp, synthetic construct
  source 1..30: mol_type = other DNA
cgtctggatggcgctcgttgcgtacagatc

SEQ ID NO: 2808 - DNA, 30 bp, synthetic construct
  source 1..30: mol_type = other DNA
cgtctggatggcgctcgttgggtacagatc

SEQ ID NO: 2809 - DNA, 30 bp, synthetic construct
  source 1..30: mol_type = other DNA
cgtctggatggcgctcgtaatattcagatc

SEQ ID NO: 2810 - DNA, 30 bp, synthetic construct
  source 1..30: mol_type = other DNA
cgtctggatggcgctcgtaatatgcagatc

SEQ ID NO: 2811 - DNA, 30 bp, synthetic construct
  source 1..30: mol_type = other DNA
cgtctggatggcgctcgtaatacccagatc

SEQ ID NO: 2812 - DNA, 30 bp, synthetic construct
  source 1..30: mol_type = other DNA
cgtctggatggcgctcgtaataaccagatc

SEQ ID NO: 2813 - DNA, 30 bp, synthetic construct
  source 1..30: mol_type = other DNA
cgtctggatggcgctcgtaataaacagatc

SEQ ID NO: 2814 - DNA, 30 bp, synthetic construct
  source 1..30: mol_type = other DNA
cgtctggatggcgctcgtaatagccagatc

SEQ ID NO: 2815 - DNA, 30 bp, synthetic construct
  source 1..30: mol_type = other DNA
cgtctggatggcgctcgtaatcgtcagatc

SEQ ID NO: 2816 - DNA, 30 bp, synthetic construct
  source 1..30: mol_type = other DNA
cgtctggatggcgctcgtaatctgcagatc

SEQ ID NO: 2817 - DNA, 30 bp, synthetic construct
  source 1..30: mol_type = other DNA
cgtctggatggcgctcgtaatccgcagatc

SEQ ID NO: 2818 - DNA, 30 bp, synthetic construct
  source 1..30: mol_type = other DNA
cgtctggatggcgctcgtaatcatcagatc

SEQ ID NO: 2819 - DNA, 30 bp, synthetic construct
  source 1..30: mol_type = other DNA
cgtctggatggcgctcgtaatcagcagatc

SEQ ID NO: 2820 - DNA, 30 bp, synthetic construct
  source 1..30: mol_type = other DNA
cgtctggatggcgctcgtaatgcgcagatc

SEQ ID NO: 2821 - DNA, 30 bp, synthetic construct
  source 1..30: mol_type = other DNA
cgtctggatggcgctcgtaatgatcagatc

SEQ ID NO: 2822 - DNA, 30 bp, synthetic construct
  source 1..30: mol_type = other DNA
cgtctggatggcgctcgtaatgaacagatc

SEQ ID NO: 2823 - DNA, 30 bp, synthetic construct
  source 1..30: mol_type = other DNA
cgtctggatggcgctcgtaatggccagatc

SEQ ID NO: 2824 - DNA, 30 bp, synthetic construct
  source 1..30: mol_type = other DNA
cgtctggatggcgctcgtaattttcagatc

SEQ ID NO: 2825 - DNA, 30 bp, synthetic construct
  source 1..30: mol_type = other DNA
cgtctggatggcgctcgtaattatcagatc

SEQ ID NO: 2826 - DNA, 30 bp, synthetic construct
  source 1..30: mol_type = other DNA
cgtctggatggcgctcgtaattgccagatc

SEQ ID NO: 2827 - DNA, 30 bp, synthetic construct
  source 1..30: mol_type = other DNA
cgtctggatggcgctcgtaattggcagatc

SEQ ID NO: 2828 - DNA, 30 bp, synthetic construct
  source 1..30: mol_type = other DNA
cgtctggatggcgctcgtaatgtaattatc

SEQ ID NO: 2829 - DNA, 30 bp, synthetic construct
  source 1..30: mol_type = other DNA
cgtctggatggcgctcgtaatgtaatgatc

SEQ ID NO: 2830 - DNA, 30 bp, synthetic construct
  source 1..30: mol_type = other DNA
cgtctggatggcgctcgtaatgtaaccatc

SEQ ID NO: 2831 - DNA, 30 bp, synthetic construct
  source 1..30: mol_type = other DNA
cgtctggatggcgctcgtaatgtaaacatc

SEQ ID NO: 2832 - DNA, 30 bp, synthetic construct
  source 1..30: mol_type = other DNA
cgtctggatggcgctcgtaatgtaaaaatc

SEQ ID NO: 2833 - DNA, 30 bp, synthetic construct
  source 1..30: mol_type = other DNA
cgtctggatggcgctcgtaatgtaagcatc

SEQ ID NO: 2834 - DNA, 30 bp, synthetic construct
  source 1..30: mol_type = other DNA
cgtctggatggcgctcgtaatgtacgtatc

SEQ ID NO: 2835 - DNA, 30 bp, synthetic construct
  source 1..30: mol_type = other DNA
cgtctggatggcgctcgtaatgtactgatc

SEQ ID NO: 2836 - DNA, 30 bp, synthetic construct
  source 1..30: mol_type = other DNA
cgtctggatggcgctcgtaatgtaccgatc

SEQ ID NO: 2837 - DNA, 30 bp, synthetic construct
  source 1..30: mol_type = other DNA
cgtctggatggcgctcgtaatgtacatatc

SEQ ID NO: 2838 - DNA, 30 bp, synthetic construct
  source 1..30: mol_type = other DNA
cgtctggatggcgctcgtaatgtagtgatc

SEQ ID NO: 2839 - DNA, 30 bp, synthetic construct
  source 1..30: mol_type = other DNA
cgtctggatggcgctcgtaatgtagcgatc

SEQ ID NO: 2840 - DNA, 30 bp, synthetic construct
  source 1..30: mol_type = other DNA
cgtctggatggcgctcgtaatgtagatatc

SEQ ID NO: 2841 - DNA, 30 bp, synthetic construct
  source 1..30: mol_type = other DNA
cgtctggatggcgctcgtaatgtagaaatc

SEQ ID NO: 2842 - DNA, 30 bp, synthetic construct
  source 1..30: mol_type = other DNA
cgtctggatggcgctcgtaatgtaggcatc

SEQ ID NO: 2843 - DNA, 30 bp, synthetic construct
  source 1..30: mol_type = other DNA
cgtctggatggcgctcgtaatgtatttatc

SEQ ID NO: 2844 - DNA, 30 bp, synthetic construct
  source 1..30: mol_type = other DNA
cgtctggatggcgctcgtaatgtatatatc

SEQ ID NO: 2845 - DNA, 30 bp, synthetic construct
  source 1..30: mol_type = other DNA
cgtctggatggcgctcgtaatgtatgcatc

SEQ ID NO: 2846 - DNA, 30 bp, synthetic construct
  source 1..30: mol_type = other DNA
cgtctggatggcgctcgtaatgtatggatc

SEQ ID NO: 2847 - DNA, 30 bp, synthetic construct
  source 1..30: mol_type = other DNA
cgtctggatggcgctcgtaatgtacagatg

SEQ ID NO: 2848 - DNA, 30 bp, synthetic construct
  source 1..30: mol_type = other DNA
cgtctggatggcgctcgtaatgtacagacc

SEQ ID NO: 2849 - DNA, 30 bp, synthetic construct
  source 1..30: mol_type = other DNA
cgtctggatggcgctcgtaatgtacagaac

SEQ ID NO: 2850 - DNA, 30 bp, synthetic construct
  source 1..30: mol_type = other DNA
cgtctggatggcgctcgtaatgtacagaaa

SEQ ID NO: 2851 - DNA, 30 bp, synthetic construct
  source 1..30: mol_type = other DNA
cgtctggatggcgctcgtaatgtacagagc

SEQ ID NO: 2852 - DNA, 30 bp, synthetic construct
  source 1..30: mol_type = other DNA
cgtctggatggcgctcgtaatgtacagcgt

SEQ ID NO: 2853 - DNA, 30 bp, synthetic construct
  source 1..30: mol_type = other DNA
cgtctggatggcgctcgtaatgtacagctg

SEQ ID NO: 2854 - DNA, 30 bp, synthetic construct
  source 1..30: mol_type = other DNA
cgtctggatggcgctcgtaatgtacagccg

SEQ ID NO: 2855 - DNA, 30 bp, synthetic construct
  source 1..30: mol_type = other DNA
cgtctggatggcgctcgtaatgtacagcat

SEQ ID NO: 2856 - DNA, 30 bp, synthetic construct
  source 1..30: mol_type = other DNA
cgtctggatggcgctcgtaatgtacagcag

SEQ ID NO: 2857 - DNA, 30 bp, synthetic construct
  source 1..30: mol_type = other DNA
cgtctggatggcgctcgtaatgtacaggtg

SEQ ID NO: 2858 - DNA, 30 bp, synthetic construct
  source 1..30: mol_type = other DNA
cgtctggatggcgctcgtaatgtacaggcg

SEQ ID NO: 2859 - DNA, 30 bp, synthetic construct
  source 1..30: mol_type = other DNA
cgtctggatggcgctcgtaatgtacaggat

SEQ ID NO: 2860 - DNA, 30 bp, synthetic construct
  source 1..30: mol_type = other DNA
cgtctggatggcgctcgtaatgtacaggaa

SEQ ID NO: 2861 - DNA, 30 bp, synthetic construct
  source 1..30: mol_type = other DNA
cgtctggatggcgctcgtaatgtacagggc

SEQ ID NO: 2862 - DNA, 30 bp, synthetic construct
  source 1..30: mol_type = other DNA
cgtctggatggcgctcgtaatgtacagttt

SEQ ID NO: 2863 - DNA, 30 bp, synthetic construct
  source 1..30: mol_type = other DNA
cgtctggatggcgctcgtaatgtacagtat

SEQ ID NO: 2864 - DNA, 30 bp, synthetic construct
  source 1..30: mol_type = other DNA
cgtctggatggcgctcgtaatgtacagtgc

SEQ ID NO: 2865 - DNA, 30 bp, synthetic construct
  source 1..30: mol_type = other DNA
cgtctggatggcgctcgtaatgtacagtgg

SEQ ID NO: 2866 - DNA, 30 bp, Bacillus subtilis
  source 1..30: mol_type = genomic DNA
cacggtgtcggccacatcggtctgctgtac

SEQ ID NO: 2867 - DNA, 30 bp, synthetic construct
  source 1..30: mol_type = other DNA
attggtgtcggccacatcggtctgctgtac

SEQ ID NO: 2868 - DNA, 30 bp, synthetic construct
  source 1..30: mol_type = other DNA
atgggtgtcggccacatcggtctgctgtac

SEQ ID NO: 2869 - DNA, 30 bp, synthetic construct
  source 1..30: mol_type = other DNA
accggtgtcggccacatcggtctgctgtac

SEQ ID NO: 2870 - DNA, 30 bp, synthetic construct
  source 1..30: mol_type = other DNA
aacggtgtcggccacatcggtctgctgtac

SEQ ID NO: 2871 - DNA, 30 bp, synthetic construct
  source 1..30: mol_type = other DNA
aaaggtgtcggccacatcggtctgctgtac

SEQ ID NO: 2872 - DNA, 30 bp, synthetic construct
  source 1..30: mol_type = other DNA
agcggtgtcggccacatcggtctgctgtac

SEQ ID NO: 2873 - DNA, 30 bp, synthetic construct
  source 1..30: mol_type = other DNA
cgtggtgtcggccacatcggtctgctgtac

SEQ ID NO: 2874 - DNA, 30 bp, synthetic construct
  source 1..30: mol_type = other DNA
ctgggtgtcggccacatcggtctgctgtac

SEQ ID NO: 2875 - DNA, 30 bp, synthetic construct
  source 1..30: mol_type = other DNA
ccgggtgtcggccacatcggtctgctgtac

SEQ ID NO: 2876 - DNA, 30 bp, synthetic construct
  source 1..30: mol_type = other DNA
cagggtgtcggccacatcggtctgctgtac

SEQ ID NO: 2877 - DNA, 30 bp, synthetic construct
  source 1..30: mol_type = other DNA
gtgggtgtcggccacatcggtctgctgtac

SEQ ID NO: 2878 - DNA, 30 bp, synthetic construct
  source 1..30: mol_type = other DNA
gcgggtgtcggccacatcggtctgctgtac

SEQ ID NO: 2879 - DNA, 30 bp, synthetic construct
  source 1..30: mol_type = other DNA
gatggtgtcggccacatcggtctgctgtac

SEQ ID NO: 2880 - DNA, 30 bp, synthetic construct
  source 1..30: mol_type = other DNA
gaaggtgtcggccacatcggtctgctgtac

SEQ ID NO: 2881 - DNA, 30 bp, synthetic construct
  source 1..30: mol_type = other DNA
ggcggtgtcggccacatcggtctgctgtac

SEQ ID NO: 2882 - DNA, 30 bp, synthetic construct
  source 1..30: mol_type = other DNA
tttggtgtcggccacatcggtctgctgtac

SEQ ID NO: 2883 - DNA, 30 bp, synthetic construct
  source 1..30: mol_type = other DNA
tatggtgtcggccacatcggtctgctgtac

SEQ ID NO: 2884 - DNA, 30 bp, synthetic construct
  source 1..30: mol_type = other DNA
tgcggtgtcggccacatcggtctgctgtac

SEQ ID NO: 2885 - DNA, 30 bp, synthetic construct
  source 1..30: mol_type = other DNA
tggggtgtcggccacatcggtctgctgtac

SEQ ID NO: 2886 - DNA, 30 bp, synthetic construct
  source 1..30: mol_type = other DNA
cacattgtcggccacatcggtctgctgtac

SEQ ID NO: 2887 - DNA, 30 bp, synthetic construct
  source 1..30: mol_type = other DNA
cacatggtcggccacatcggtctgctgtac

SEQ ID NO: 2888 - DNA, 30 bp, synthetic construct
  source 1..30: mol_type = other DNA
cacaccgtcggccacatcggtctgctgtac

SEQ ID NO: 2889 - DNA, 30 bp, synthetic construct
  source 1..30: mol_type = other DNA
cacaacgtcggccacatcggtctgctgtac

SEQ ID NO: 2890 - DNA, 30 bp, synthetic construct
  source 1..30: mol_type = other DNA
cacaaagtcggccacatcggtctgctgtac

SEQ ID NO: 2891 - DNA, 30 bp, synthetic construct
  source 1..30: mol_type = other DNA
cacagcgtcggccacatcggtctgctgtac

SEQ ID NO: 2892 - DNA, 30 bp, synthetic construct
  source 1..30: mol_type = other DNA
caccgtgtcggccacatcggtctgctgtac

SEQ ID NO: 2893 - DNA, 30 bp, synthetic construct
  source 1..30: mol_type = other DNA
cacctggtcggccacatcggtctgctgtac

SEQ ID NO: 2894 - DNA, 30 bp, synthetic construct
  source 1..30: mol_type = other DNA
cacccggtcggccacatcggtctgctgtac

SEQ ID NO: 2895 - DNA, 30 bp, synthetic construct
  source 1..30: mol_type = other DNA
caccatgtcggccacatcggtctgctgtac

SEQ ID NO: 2896 - DNA, 30 bp, synthetic construct
  source 1..30: mol_type = other DNA
caccaggtcggccacatcggtctgctgtac

SEQ ID NO: 2897 - DNA, 30 bp, synthetic construct
  source 1..30: mol_type = other DNA
cacgtggtcggccacatcggtctgctgtac

SEQ ID NO: 2898 - DNA, 30 bp, synthetic construct
  source 1..30: mol_type = other DNA
cacgcggtcggccacatcggtctgctgtac

SEQ ID NO: 2899 - DNA, 30 bp, synthetic construct
  source 1..30: mol_type = other DNA
cacgatgtcggccacatcggtctgctgtac

SEQ ID NO: 2900 - DNA, 30 bp, synthetic construct
  source 1..30: mol_type = other DNA
cacgaagtcggccacatcggtctgctgtac

SEQ ID NO: 2901 - DNA, 30 bp, synthetic construct
  source 1..30: mol_type = other DNA
cactttgtcggccacatcggtctgctgtac

SEQ ID NO: 2902 - DNA, 30 bp, synthetic construct
  source 1..30: mol_type = other DNA
cactatgtcggccacatcggtctgctgtac

SEQ ID NO: 2903 - DNA, 30 bp, synthetic construct
  source 1..30: mol_type = other DNA
cactgcgtcggccacatcggtctgctgtac

SEQ ID NO: 2904 - DNA, 30 bp, synthetic construct
  source 1..30: mol_type = other DNA
cactgggtcggccacatcggtctgctgtac

SEQ ID NO: 2905 - DNA, 30 bp, synthetic construct
  source 1..30: mol_type = other DNA
cacggtattggccacatcggtctgctgtac

SEQ ID NO: 2906 - DNA, 30 bp, synthetic construct
  source 1..30: mol_type = other DNA
cacggtatgggccacatcggtctgctgtac

SEQ ID NO: 2907 - DNA, 30 bp, synthetic construct
  source 1..30: mol_type = other DNA
cacggtaccggccacatcggtctgctgtac

SEQ ID NO: 2908 - DNA, 30 bp, synthetic construct
  source 1..30: mol_type = other DNA
cacggtaacggccacatcggtctgctgtac

SEQ ID NO: 2909 - DNA, 30 bp, synthetic construct
  source 1..30: mol_type = other DNA
cacggtaaaggccacatcggtctgctgtac

SEQ ID NO: 2910 - DNA, 30 bp, synthetic construct
  source 1..30: mol_type = other DNA
cacggtagcggccacatcggtctgctgtac

SEQ ID NO: 2911 - DNA, 30 bp, synthetic construct
  source 1..30: mol_type = other DNA
cacggtcgtggccacatcggtctgctgtac

SEQ ID NO: 2912 - DNA, 30 bp, synthetic construct
  source 1..30: mol_type = other DNA
cacggtctgggccacatcggtctgctgtac

SEQ ID NO: 2913 - DNA, 30 bp, synthetic construct
  source 1..30: mol_type = other DNA
cacggtccgggccacatcggtctgctgtac

SEQ ID NO: 2914 - DNA, 30 bp, synthetic construct
  source 1..30: mol_type = other DNA
cacggtcatggccacatcggtctgctgtac

SEQ ID NO: 2915 - DNA, 30 bp, synthetic construct
  source 1..30: mol_type = other DNA
cacggtcagggccacatcggtctgctgtac

SEQ ID NO: 2916 - DNA, 30 bp, synthetic construct
  source 1..30: mol_type = other DNA
cacggtgcgggccacatcggtctgctgtac

SEQ ID NO: 2917 - DNA, 30 bp, synthetic construct
  source 1..30: mol_type = other DNA
cacggtgatggccacatcggtctgctgtac

SEQ ID NO: 2918 - DNA, 30 bp, synthetic construct
  source 1..30: mol_type = other DNA
cacggtgaaggccacatcggtctgctgtac

SEQ ID NO: 2919 - DNA, 30 bp, synthetic construct
  source 1..30: mol_type = other DNA
cacggtggcggccacatcggtctgctgtac

SEQ ID NO: 2920 - DNA, 30 bp, synthetic construct
  source 1..30: mol_type = other DNA
cacggttttggccacatcggtctgctgtac

SEQ ID NO: 2921 - DNA, 30 bp, synthetic construct
  source 1..30: mol_type = other DNA
cacggttatggccacatcggtctgctgtac

SEQ ID NO: 2922 - DNA, 30 bp, synthetic construct
  source 1..30: mol_type = other DNA
cacggttgcggccacatcggtctgctgtac

SEQ ID NO: 2923 - DNA, 30 bp, synthetic construct
  source 1..30: mol_type = other DNA
cacggttggggccacatcggtctgctgtac

SEQ ID NO: 2924 - DNA, 30 bp, synthetic construct
  source 1..30: mol_type = other DNA
cacggtgtcattcacatcggtctgctgtac

SEQ ID NO: 2925 - DNA, 30 bp, synthetic construct
  source 1..30: mol_type = other DNA
cacggtgtcatgcacatcggtctgctgtac

SEQ ID NO: 2926 - DNA, 30 bp, synthetic construct
  source 1..30: mol_type = other DNA
cacggtgtcacccacatcggtctgctgtac

SEQ ID NO: 2927 - DNA, 30 bp, synthetic construct
  source 1..30: mol_type = other DNA
cacggtgtcaaccacatcggtctgctgtac

SEQ ID NO: 2928 - DNA, 30 bp, synthetic construct
  source 1..30: mol_type = other DNA
cacggtgtcaaacacatcggtctgctgtac

SEQ ID NO: 2929 - DNA, 30 bp, synthetic construct
  source 1..30: mol_type = other DNA
cacggtgtcagccacatcggtctgctgtac

SEQ ID NO: 2930 - DNA, 30 bp, synthetic construct
  source 1..30: mol_type = other DNA
cacggtgtccgtcacatcggtctgctgtac

SEQ ID NO: 2931 - DNA, 30 bp, synthetic construct
  source 1..30: mol_type = other DNA
cacggtgtcctgcacatcggtctgctgtac

SEQ ID NO: 2932 - DNA, 30 bp, synthetic construct
  source 1..30: mol_type = other DNA
cacggtgtcccgcacatcggtctgctgtac

SEQ ID NO: 2933 - DNA, 30 bp, synthetic construct
  source 1..30: mol_type = other DNA
cacggtgtccatcacatcggtctgctgtac

SEQ ID NO: 2934 - DNA, 30 bp, synthetic construct
  source 1..30: mol_type = other DNA
cacggtgtccagcacatcggtctgctgtac

SEQ ID NO: 2935 - DNA, 30 bp, synthetic construct
  source 1..30: mol_type = other DNA
cacggtgtcgtgcacatcggtctgctgtac

SEQ ID NO: 2936 - DNA, 30 bp, synthetic construct
  source 1..30: mol_type = other DNA
cacggtgtcgcgcacatcggtctgctgtac

SEQ ID NO: 2937 - DNA, 30 bp, synthetic construct
  source 1..30: mol_type = other DNA
cacggtgtcgatcacatcggtctgctgtac

SEQ ID NO: 2938 - DNA, 30 bp, synthetic construct
  source 1..30: mol_type = other DNA
cacggtgtcgaacacatcggtctgctgtac

SEQ ID NO: 2939 - DNA, 30 bp, synthetic construct
  source 1..30: mol_type = other DNA
cacggtgtctttcacatcggtctgctgtac

SEQ ID NO: 2940 - DNA, 30 bp, synthetic construct
  source 1..30: mol_type = other DNA
cacggtgtctatcacatcggtctgctgtac

SEQ ID NO: 2941 - DNA, 30 bp, synthetic construct
  source 1..30: mol_type = other DNA
cacggtgtctgccacatcggtctgctgtac

SEQ ID NO: 2942 - DNA, 30 bp, synthetic construct
  source 1..30: mol_type = other DNA
cacggtgtctggcacatcggtctgctgtac

SEQ ID NO: 2943 - DNA, 30 bp, synthetic construct
  source 1..30: mol_type = other DNA
cacggtgtcggcattatcggtctgctgtac

SEQ ID NO: 2944 - DNA, 30 bp, synthetic construct
  source 1..30: mol_type = other DNA
cacggtgtcggcatgatcggtctgctgtac

SEQ ID NO: 2945 - DNA, 30 bp, synthetic construct
  source 1..30: mol_type = other DNA
cacggtgtcggcaccatcggtctgctgtac

SEQ ID NO: 2946 - DNA, 30 bp, synthetic construct
  source 1..30: mol_type = other DNA
cacggtgtcggcaacatcggtctgctgtac

SEQ ID NO: 2947 - DNA, 30 bp, synthetic construct
  source 1..30: mol_type = other DNA
cacggtgtcggcaaaatcggtctgctgtac

SEQ ID NO: 2948 - DNA, 30 bp, synthetic construct
  source 1..30: mol_type = other DNA
cacggtgtcggcagcatcggtctgctgtac

SEQ ID NO: 2949 - DNA, 30 bp, synthetic construct
  source 1..30: mol_type = other DNA
cacggtgtcggccgtatcggtctgctgtac

SEQ ID NO: 2950 - DNA, 30 bp, synthetic construct
  source 1..30: mol_type = other DNA
cacggtgtcggcctgatcggtctgctgtac

SEQ ID NO: 2951 - DNA, 30 bp, synthetic construct
  source 1..30: mol_type = other DNA
cacggtgtcggcccgatcggtctgctgtac

SEQ ID NO: 2952 - DNA, 30 bp, synthetic construct
  source 1..30: mol_type = other DNA
cacggtgtcggccagatcggtctgctgtac

SEQ ID NO: 2953 - DNA, 30 bp, synthetic construct
  source 1..30: mol_type = other DNA
cacggtgtcggcgtgatcggtctgctgtac

SEQ ID NO: 2954 - DNA, 30 bp, synthetic construct
  source 1..30: mol_type = other DNA
cacggtgtcggcgcgatcggtctgctgtac

SEQ ID NO: 2955 - DNA, 30 bp, synthetic construct
  source 1..30: mol_type = other DNA
cacggtgtcggcgatatcggtctgctgtac

SEQ ID NO: 2956 - DNA, 30 bp, synthetic construct
  source 1..30: mol_type = other DNA
cacggtgtcggcgaaatcggtctgctgtac

SEQ ID NO: 2957 - DNA, 30 bp, synthetic construct
  source 1..30: mol_type = other DNA
cacggtgtcggcggcatcggtctgctgtac

SEQ ID NO: 2958 - DNA, 30 bp, synthetic construct
  source 1..30: mol_type = other DNA
cacggtgtcggctttatcggtctgctgtac

SEQ ID NO: 2959 - DNA, 30 bp, synthetic construct
  source 1..30: mol_type = other DNA
cacggtgtcggctatatcggtctgctgtac

SEQ ID NO: 2960 - DNA, 30 bp, synthetic construct
  source 1..30: mol_type = other DNA
cacggtgtcggctgcatcggtctgctgtac

SEQ ID NO: 2961 - DNA, 30 bp, synthetic construct
  source 1..30: mol_type = other DNA
cacggtgtcggctggatcggtctgctgtac

SEQ ID NO: 2962 - DNA, 30 bp, synthetic construct
  source 1..30: mol_type = other DNA
cacggtgtcggccacatgggtctgctgtac

SEQ ID NO: 2963 - DNA, 30 bp, synthetic construct
  source 1..30: mol_type = other DNA
cacggtgtcggccacaccggtctgctgtac

SEQ ID NO: 2964 - DNA, 30 bp, synthetic construct
  source 1..30: mol_type = other DNA
cacggtgtcggccacaacggtctgctgtac

SEQ ID NO: 2965 - DNA, 30 bp, synthetic construct
  source 1..30: mol_type = other DNA
cacggtgtcggccacaaaggtctgctgtac

SEQ ID NO: 2966 - DNA, 30 bp, synthetic construct
  source 1..30: mol_type = other DNA
cacggtgtcggccacagcggtctgctgtac

SEQ ID NO: 2967 - DNA, 30 bp, synthetic construct
  source 1..30: mol_type = other DNA
cacggtgtcggccaccgtggtctgctgtac

SEQ ID NO: 2968 - DNA, 30 bp, synthetic construct
  source 1..30: mol_type = other DNA
cacggtgtcggccacctgggtctgctgtac

SEQ ID NO: 2969 - DNA, 30 bp, synthetic construct
  source 1..30: mol_type = other DNA
cacggtgtcggccacccgggtctgctgtac

SEQ ID NO: 2970 - DNA, 30 bp, synthetic construct
  source 1..30: mol_type = other DNA
cacggtgtcggccaccatggtctgctgtac

SEQ ID NO: 2971 - DNA, 30 bp, synthetic construct
  source 1..30: mol_type = other DNA
cacggtgtcggccaccagggtctgctgtac

SEQ ID NO: 2972 - DNA, 30 bp, synthetic construct
  source 1..30: mol_type = other DNA
cacggtgtcggccacgtgggtctgctgtac

SEQ ID NO: 2973 - DNA, 30 bp, synthetic construct
  source 1..30: mol_type = other DNA
cacggtgtcggccacgcgggtctgctgtac

SEQ ID NO: 2974 - DNA, 30 bp, synthetic construct
  source 1..30: mol_type = other DNA
cacggtgtcggccacgatggtctgctgtac

SEQ ID NO: 2975 - DNA, 30 bp, synthetic construct
  source 1..30: mol_type = other DNA
cacggtgtcggccacgaaggtctgctgtac

SEQ ID NO: 2976 - DNA, 30 bp, synthetic construct
  source 1..30: mol_type = other DNA
cacggtgtcggccacggcggtctgctgtac

SEQ ID NO: 2977 - DNA, 30 bp, synthetic construct
  source 1..30: mol_type = other DNA
cacggtgtcggccactttggtctgctgtac

SEQ ID NO: 2978 - DNA, 30 bp, synthetic construct
  source 1..30: mol_type = other DNA
cacggtgtcggccactatggtctgctgtac

SEQ ID NO: 2979 - DNA, 30 bp, synthetic construct
  source 1..30: mol_type = other DNA
cacggtgtcggccactgcggtctgctgtac

SEQ ID NO: 2980 - DNA, 30 bp, synthetic construct
  source 1..30: mol_type = other DNA
cacggtgtcggccactggggtctgctgtac

SEQ ID NO: 2981 - DNA, 30 bp, synthetic construct
  source 1..30: mol_type = other DNA
cacggtgtcggccacatcattctgctgtac

SEQ ID NO: 2982 - DNA, 30 bp, synthetic construct
  source 1..30: mol_type = other DNA
cacggtgtcggccacatcatgctgctgtac

SEQ ID NO: 2983 - DNA, 30 bp, synthetic construct
  source 1..30: mol_type = other DNA
cacggtgtcggccacatcaccctgctgtac

SEQ ID NO: 2984 - DNA, 30 bp, synthetic construct
  source 1..30: mol_type = other DNA
cacggtgtcggccacatcaacctgctgtac

SEQ ID NO: 2985 - DNA, 30 bp, synthetic construct
  source 1..30: mol_type = other DNA
cacggtgtcggccacatcaaactgctgtac

SEQ ID NO: 2986 - DNA, 30 bp, synthetic construct
  source 1..30: mol_type = other DNA
cacggtgtcggccacatcagcctgctgtac

SEQ ID NO: 2987 - DNA, 30 bp, synthetic construct
  source 1..30: mol_type = other DNA
cacggtgtcggccacatccgtctgctgtac

SEQ ID NO: 2988 - DNA, 30 bp, synthetic construct
  source 1..30: mol_type = other DNA
cacggtgtcggccacatcctgctgctgtac

SEQ ID NO: 2989 - DNA, 30 bp, synthetic construct
  source 1..30: mol_type = other DNA
cacggtgtcggccacatcccgctgctgtac

SEQ ID NO: 2990 - DNA, 30 bp, synthetic construct
  source 1..30: mol_type = other DNA
cacggtgtcggccacatccatctgctgtac

SEQ ID NO: 2991 - DNA, 30 bp, synthetic construct
  source 1..30: mol_type = other DNA
cacggtgtcggccacatccagctgctgtac

SEQ ID NO: 2992 - DNA, 30 bp, synthetic construct
  source 1..30: mol_type = other DNA
cacggtgtcggccacatcgtgctgctgtac

SEQ ID NO: 2993 - DNA, 30 bp, synthetic construct
  source 1..30: mol_type = other DNA
cacggtgtcggccacatcgcgctgctgtac

SEQ ID NO: 2994 - DNA, 30 bp, synthetic construct
  source 1..30: mol_type = other DNA
cacggtgtcggccacatcgatctgctgtac

SEQ ID NO: 2995 - DNA, 30 bp, synthetic construct
  source 1..30: mol_type = other DNA
cacggtgtcggccacatcgaactgctgtac

SEQ ID NO: 2996 - DNA, 30 bp, synthetic construct
  source 1..30: mol_type = other DNA
cacggtgtcggccacatctttctgctgtac

SEQ ID NO: 2997 - DNA, 30 bp, synthetic construct
  source 1..30: mol_type = other DNA
cacggtgtcggccacatctatctgctgtac

SEQ ID NO: 2998 - DNA, 30 bp, synthetic construct
  source 1..30: mol_type = other DNA
cacggtgtcggccacatctgcctgctgtac

SEQ ID NO: 2999 - DNA, 30 bp, synthetic construct
  source 1..30: mol_type = other DNA
cacggtgtcggccacatctggctgctgtac

SEQ ID NO: 3000 - DNA, 30 bp, synthetic construct
  source 1..30: mol_type = other DNA
cacggtgtcggccacatcggtattctgtac

SEQ ID NO: 3001 - DNA, 30 bp, synthetic construct
  source 1..30: mol_type = other DNA
cacggtgtcggccacatcggtatgctgtac

SEQ ID NO: 3002 - DNA, 30 bp, synthetic construct
  source 1..30: mol_type = other DNA
cacggtgtcggccacatcggtaccctgtac

SEQ ID NO: 3003 - DNA, 30 bp, synthetic construct
  source 1..30: mol_type = other DNA
cacggtgtcggccacatcggtaacctgtac

SEQ ID NO: 3004 - DNA, 30 bp, synthetic construct
  source 1..30: mol_type = other DNA
cacggtgtcggccacatcggtaaactgtac

SEQ ID NO: 3005 - DNA, 30 bp, synthetic construct
  source 1..30: mol_type = other DNA
cacggtgtcggccacatcggtagcctgtac

SEQ ID NO: 3006 - DNA, 30 bp, synthetic construct
  source 1..30: mol_type = other DNA
cacggtgtcggccacatcggtcgtctgtac

SEQ ID NO: 3007 - DNA, 30 bp, synthetic construct
  source 1..30: mol_type = other DNA
cacggtgtcggccacatcggtccgctgtac

SEQ ID NO: 3008 - DNA, 30 bp, synthetic construct
  source 1..30: mol_type = other DNA
cacggtgtcggccacatcggtcatctgtac

SEQ ID NO: 3009 - DNA, 30 bp, synthetic construct
  source 1..30: mol_type = other DNA
cacggtgtcggccacatcggtcagctgtac

SEQ ID NO: 3010 - DNA, 30 bp, synthetic construct
  source 1..30: mol_type = other DNA
cacggtgtcggccacatcggtgtgctgtac

SEQ ID NO: 3011 - DNA, 30 bp, synthetic construct
  source 1..30: mol_type = other DNA
cacggtgtcggccacatcggtgcgctgtac

SEQ ID NO: 3012 - DNA, 30 bp, synthetic construct
  source 1..30: mol_type = other DNA
cacggtgtcggccacatcggtgatctgtac

SEQ ID NO: 3013 - DNA, 30 bp, synthetic construct
  source 1..30: mol_type = other DNA
cacggtgtcggccacatcggtgaactgtac

SEQ ID NO: 3014 - DNA, 30 bp, synthetic construct
  source 1..30: mol_type = other DNA
cacggtgtcggccacatcggtggcctgtac

SEQ ID NO: 3015 - DNA, 30 bp, synthetic construct
  source 1..30: mol_type = other DNA
cacggtgtcggccacatcggttttctgtac

SEQ ID NO: 3016 - DNA, 30 bp, synthetic construct
  source 1..30: mol_type = other DNA
cacggtgtcggccacatcggttatctgtac

SEQ ID NO: 3017 - DNA, 30 bp, synthetic construct
  source 1..30: mol_type = other DNA
cacggtgtcggccacatcggttgcctgtac

SEQ ID NO: 3018 - DNA, 30 bp, synthetic construct
  source 1..30: mol_type = other DNA
cacggtgtcggccacatcggttggctgtac

SEQ ID NO: 3019 - DNA, 30 bp, synthetic construct
  source 1..30: mol_type = other DNA
cacggtgtcggccacatcggtctgatttac

SEQ ID NO: 3020 - DNA, 30 bp, synthetic construct
  source 1..30: mol_type = other DNA
cacggtgtcggccacatcggtctgatgtac

SEQ ID NO: 3021 - DNA, 30 bp, synthetic construct
  source 1..30: mol_type = other DNA
cacggtgtcggccacatcggtctgacctac

SEQ ID NO: 3022 - DNA, 30 bp, synthetic construct
  source 1..30: mol_type = other DNA
cacggtgtcggccacatcggtctgaactac

SEQ ID NO: 3023 - DNA, 30 bp, synthetic construct
  source 1..30: mol_type = other DNA
cacggtgtcggccacatcggtctgaaatac

SEQ ID NO: 3024 - DNA, 30 bp, synthetic construct
  source 1..30: mol_type = other DNA
cacggtgtcggccacatcggtctgagctac

SEQ ID NO: 3025 - DNA, 30 bp, synthetic construct
  source 1..30: mol_type = other DNA
cacggtgtcggccacatcggtctgcgttac

SEQ ID NO: 3026 - DNA, 30 bp, synthetic construct
  source 1..30: mol_type = other DNA
cacggtgtcggccacatcggtctgccgtac

SEQ ID NO: 3027 - DNA, 30 bp, synthetic construct
  source 1..30: mol_type = other DNA
cacggtgtcggccacatcggtctgcattac

SEQ ID NO: 3028 - DNA, 30 bp, synthetic construct
  source 1..30: mol_type = other DNA
cacggtgtcggccacatcggtctgcagtac

SEQ ID NO: 3029 - DNA, 30 bp, synthetic construct
  source 1..30: mol_type = other DNA
cacggtgtcggccacatcggtctggtgtac

SEQ ID NO: 3030 - DNA, 30 bp, synthetic construct
  source 1..30: mol_type = other DNA
cacggtgtcggccacatcggtctggcgtac

SEQ ID NO: 3031 - DNA, 30 bp, synthetic construct
  source 1..30: mol_type = other DNA
cacggtgtcggccacatcggtctggattac

SEQ ID NO: 3032 - DNA, 30 bp, synthetic construct
  source 1..30: mol_type = other DNA
cacggtgtcggccacatcggtctggaatac

SEQ ID NO: 3033 - DNA, 30 bp, synthetic construct
  source 1..30: mol_type = other DNA
cacggtgtcggccacatcggtctgggctac

SEQ ID NO: 3034 - DNA, 30 bp, synthetic construct
  source 1..30: mol_type = other DNA
cacggtgtcggccacatcggtctgttttac

SEQ ID NO: 3035 - DNA, 30 bp, synthetic construct
  source 1..30: mol_type = other DNA
cacggtgtcggccacatcggtctgtattac

SEQ ID NO: 3036 - DNA, 30 bp, synthetic construct
  source 1..30: mol_type = other DNA
cacggtgtcggccacatcggtctgtgctac

SEQ ID NO: 3037 - DNA, 30 bp, synthetic construct
  source 1..30: mol_type = other DNA
cacggtgtcggccacatcggtctgtggtac

SEQ ID NO: 3038 - DNA, 30 bp, synthetic construct
  source 1..30: mol_type = other DNA
cacggtgtcggccacatcggtctgctgatt

SEQ ID NO: 3039 - DNA, 30 bp, synthetic construct
  source 1..30: mol_type = other DNA
cacggtgtcggccacatcggtctgctgatg

SEQ ID NO: 3040 - DNA, 30 bp, synthetic construct
  source 1..30: mol_type = other DNA
cacggtgtcggccacatcggtctgctgacc

SEQ ID NO: 3041 - DNA, 30 bp, synthetic construct
  source 1..30: mol_type = other DNA
cacggtgtcggccacatcggtctgctgaac

SEQ ID NO: 3042 - DNA, 30 bp, synthetic construct
  source 1..30: mol_type = other DNA
cacggtgtcggccacatcggtctgctgaaa

SEQ ID NO: 3043 - DNA, 30 bp, synthetic construct
  source 1..30: mol_type = other DNA
cacggtgtcggccacatcggtctgctgagc

SEQ ID NO: 3044 - DNA, 30 bp, synthetic construct
  source 1..30: mol_type = other DNA
cacggtgtcggccacatcggtctgctgcgt

SEQ ID NO: 3045 - DNA, 30 bp, synthetic construct
  source 1..30: mol_type = other DNA
cacggtgtcggccacatcggtctgctgctg

SEQ ID NO: 3046 - DNA, 30 bp, synthetic construct
  source 1..30: mol_type = other DNA
cacggtgtcggccacatcggtctgctgccg

SEQ ID NO: 3047 - DNA, 30 bp, synthetic construct
  source 1..30: mol_type = other DNA
cacggtgtcggccacatcggtctgctgcat

SEQ ID NO: 3048 - DNA, 30 bp, synthetic construct
  source 1..30: mol_type = other DNA
cacggtgtcggccacatcggtctgctgcag

SEQ ID NO: 3049 - DNA, 30 bp, synthetic construct
  source 1..30: mol_type = other DNA
cacggtgtcggccacatcggtctgctggtg

SEQ ID NO: 3050 - DNA, 30 bp, synthetic construct
  source 1..30: mol_type = other DNA
cacggtgtcggccacatcggtctgctggcg

SEQ ID NO: 3051 - DNA, 30 bp, synthetic construct
  source 1..30: mol_type = other DNA
cacggtgtcggccacatcggtctgctggat

SEQ ID NO: 3052 - DNA, 30 bp, synthetic construct
  source 1..30: mol_type = other DNA
cacggtgtcggccacatcggtctgctggaa

SEQ ID NO: 3053 - DNA, 30 bp, synthetic construct
  source 1..30: mol_type = other DNA
cacggtgtcggccacatcggtctgctgggc

SEQ ID NO: 3054 - DNA, 30 bp, synthetic construct
  source 1..30: mol_type = other DNA
cacggtgtcggccacatcggtctgctgttt

SEQ ID NO: 3055 - DNA, 30 bp, synthetic construct
  source 1..30: mol_type = other DNA
cacggtgtcggccacatcggtctgctgtgc

SEQ ID NO: 3056 - DNA, 30 bp, synthetic construct
  source 1..30: mol_type = other DNA
cacggtgtcggccacatcggtctgctgtgg

SEQ ID NO: 3057 - DNA, 30 bp, Bacillus subtilis
  source 1..30: mol_type = genomic DNA
agctcccaggtgaactctctgattaaagag

SEQ ID NO: 3058 - DNA, 30 bp, synthetic construct
  source 1..30: mol_type = other DNA
atttcccaggtgaactctctgattaaagag

SEQ ID NO: 3059 - DNA, 30 bp, synthetic construct
  source 1..30: mol_type = other DNA
atgtcccaggtgaactctctgattaaagag

SEQ ID NO: 3060 - DNA, 30 bp, synthetic construct
  source 1..30: mol_type = other DNA
acctcccaggtgaactctctgattaaagag

SEQ ID NO: 3061 - DNA, 30 bp, synthetic construct
  source 1..30: mol_type = other DNA
aactcccaggtgaactctctgattaaagag

SEQ ID NO: 3062 - DNA, 30 bp, synthetic construct
  source 1..30: mol_type = other DNA
aaatcccaggtgaactctctgattaaagag

SEQ ID NO: 3063 - DNA, 30 bp, synthetic construct
  source 1..30: mol_type = other DNA
cgttcccaggtgaactctctgattaaagag

SEQ ID NO: 3064 - DNA, 30 bp, synthetic construct
  source 1..30: mol_type = other DNA
ctgtcccaggtgaactctctgattaaagag

SEQ ID NO: 3065 - DNA, 30 bp, synthetic construct
  source 1..30: mol_type = other DNA
ccgtcccaggtgaactctctgattaaagag

SEQ ID NO: 3066 - DNA, 30 bp, synthetic construct
  source 1..30: mol_type = other DNA
cattcccaggtgaactctctgattaaagag

SEQ ID NO: 3067 - DNA, 30 bp, synthetic construct
  source 1..30: mol_type = other DNA
cagtcccaggtgaactctctgattaaagag

SEQ ID NO: 3068 - DNA, 30 bp, synthetic construct
  source 1..30: mol_type = other DNA
gtgtcccaggtgaactctctgattaaagag

SEQ ID NO: 3069 - DNA, 30 bp, synthetic construct
  source 1..30: mol_type = other DNA
gcgtcccaggtgaactctctgattaaagag

SEQ ID NO: 3070 - DNA, 30 bp, synthetic construct
  source 1..30: mol_type = other DNA
gattcccaggtgaactctctgattaaagag

SEQ ID NO: 3071 - DNA, 30 bp, synthetic construct
  source 1..30: mol_type = other DNA
gaatcccaggtgaactctctgattaaagag

SEQ ID NO: 3072 - DNA, 30 bp, synthetic construct
  source 1..30: mol_type = other DNA
ggctcccaggtgaactctctgattaaagag

SEQ ID NO: 3073 - DNA, 30 bp, synthetic construct
  source 1..30: mol_type = other DNA
ttttcccaggtgaactctctgattaaagag

SEQ ID NO: 3074 - DNA, 30 bp, synthetic construct
  source 1..30: mol_type = other DNA
tattcccaggtgaactctctgattaaagag

SEQ ID NO: 3075 - DNA, 30 bp, synthetic construct
  source 1..30: mol_type = other DNA
tgctcccaggtgaactctctgattaaagag

SEQ ID NO: 3076 - DNA, 30 bp, synthetic construct
  source 1..30: mol_type = other DNA
tggtcccaggtgaactctctgattaaagag

SEQ ID NO: 3077 - DNA, 30 bp, synthetic construct
  source 1..30: mol_type = other DNA
agcattcaggtgaactctctgattaaagag

SEQ ID NO: 3078 - DNA, 30 bp, synthetic construct
  source 1..30: mol_type = other DNA
agcatgcaggtgaactctctgattaaagag

SEQ ID NO: 3079 - DNA, 30 bp, synthetic construct
  source 1..30: mol_type = other DNA
agcacccaggtgaactctctgattaaagag

SEQ ID NO: 3080 - DNA, 30 bp, synthetic construct
  source 1..30: mol_type = other DNA
agcaaccaggtgaactctctgattaaagag

SEQ ID NO: 3081 - DNA, 30 bp, synthetic construct
  source 1..30: mol_type = other DNA
agcaaacaggtgaactctctgattaaagag

SEQ ID NO: 3082 - DNA, 30 bp, synthetic construct
  source 1..30: mol_type = other DNA
agccgtcaggtgaactctctgattaaagag

SEQ ID NO: 3083 - DNA, 30 bp, synthetic construct
  source 1..30: mol_type = other DNA
agcctgcaggtgaactctctgattaaagag

SEQ ID NO: 3084 - DNA, 30 bp, synthetic construct
  source 1..30: mol_type = other DNA
agcccgcaggtgaactctctgattaaagag

SEQ ID NO: 3085 - DNA, 30 bp, synthetic construct
  source 1..30: mol_type = other DNA
agccatcaggtgaactctctgattaaagag

SEQ ID NO: 3086 - DNA, 30 bp, synthetic construct
  source 1..30: mol_type = other DNA
agccagcaggtgaactctctgattaaagag

SEQ ID NO: 3087 - DNA, 30 bp, synthetic construct
  source 1..30: mol_type = other DNA
agcgtgcaggtgaactctctgattaaagag

SEQ ID NO: 3088 - DNA, 30 bp, synthetic construct
  source 1..30: mol_type = other DNA
agcgcgcaggtgaactctctgattaaagag

SEQ ID NO: 3089 - DNA, 30 bp, synthetic construct
  source 1..30: mol_type = other DNA
agcgatcaggtgaactctctgattaaagag

SEQ ID NO: 3090 - DNA, 30 bp, synthetic construct
  source 1..30: mol_type = other DNA
agcgaacaggtgaactctctgattaaagag

SEQ ID NO: 3091 - DNA, 30 bp, synthetic construct
  source 1..30: mol_type = other DNA
agcggccaggtgaactctctgattaaagag

SEQ ID NO: 3092 - DNA, 30 bp, synthetic construct
  source 1..30: mol_type = other DNA
agctttcaggtgaactctctgattaaagag

SEQ ID NO: 3093 - DNA, 30 bp, synthetic construct
  source 1..30: mol_type = other DNA
agctatcaggtgaactctctgattaaagag

SEQ ID NO: 3094 - DNA, 30 bp, synthetic construct
  source 1..30: mol_type = other DNA
agctgccaggtgaactctctgattaaagag

SEQ ID NO: 3095 - DNA, 30 bp, synthetic construct
  source 1..30: mol_type = other DNA
agctggcaggtgaactctctgattaaagag

SEQ ID NO: 3096 - DNA, 30 bp, synthetic construct
  source 1..30: mol_type = other DNA
agctccattgtgaactctctgattaaagag

SEQ ID NO: 3097 - DNA, 30 bp, synthetic construct
  source 1..30: mol_type = other DNA
agctccatggtgaactctctgattaaagag

SEQ ID NO: 3098 - DNA, 30 bp, synthetic construct
  source 1..30: mol_type = other DNA
agctccaccgtgaactctctgattaaagag

SEQ ID NO: 3099 - DNA, 30 bp, synthetic construct
  source 1..30: mol_type = other DNA
agctccaacgtgaactctctgattaaagag

SEQ ID NO: 3100 - DNA, 30 bp, synthetic construct
  source 1..30: mol_type = other DNA
agctccaaagtgaactctctgattaaagag

SEQ ID NO: 3101 - DNA, 30 bp, synthetic construct
  source 1..30: mol_type = other DNA
agctccagcgtgaactctctgattaaagag

SEQ ID NO: 3102 - DNA, 30 bp, synthetic construct
  source 1..30: mol_type = other DNA
agctcccgtgtgaactctctgattaaagag

SEQ ID NO: 3103 - DNA, 30 bp, synthetic construct
  source 1..30: mol_type = other DNA
agctccctggtgaactctctgattaaagag

SEQ ID NO: 3104 - DNA, 30 bp, synthetic construct
  source 1..30: mol_type = other DNA
agctccccggtgaactctctgattaaagag

SEQ ID NO: 3105 - DNA, 30 bp, synthetic construct
  source 1..30: mol_type = other DNA
agctcccatgtgaactctctgattaaagag

SEQ ID NO: 3106 - DNA, 30 bp, synthetic construct
  source 1..30: mol_type = other DNA
agctccgtggtgaactctctgattaaagag

SEQ ID NO: 3107 - DNA, 30 bp, synthetic construct
  source 1..30: mol_type = other DNA
agctccgcggtgaactctctgattaaagag

SEQ ID NO: 3108 - DNA, 30 bp, synthetic construct
  source 1..30: mol_type = other DNA
agctccgatgtgaactctctgattaaagag

SEQ ID NO: 3109 - DNA, 30 bp, synthetic construct
  source 1..30: mol_type = other DNA
agctccgaagtgaactctctgattaaagag

SEQ ID NO: 3110 - DNA, 30 bp, synthetic construct
  source 1..30: mol_type = other DNA
agctccggcgtgaactctctgattaaagag

SEQ ID NO: 3111 - DNA, 30 bp, synthetic construct
  source 1..30: mol_type = other DNA
agctcctttgtgaactctctgattaaagag

SEQ ID NO: 3112 - DNA, 30 bp, synthetic construct
  source 1..30: mol_type = other DNA
agctcctatgtgaactctctgattaaagag

SEQ ID NO: 3113 - DNA, 30 bp, synthetic construct
  source 1..30: mol_type = other DNA
agctcctgcgtgaactctctgattaaagag

SEQ ID NO: 3114 - DNA, 30 bp, synthetic construct
  source 1..30: mol_type = other DNA
agctcctgggtgaactctctgattaaagag

SEQ ID NO: 3115 - DNA, 30 bp, synthetic construct
  source 1..30: mol_type = other DNA
agctcccagattaactctctgattaaagag

SEQ ID NO: 3116 - DNA, 30 bp, synthetic construct
  source 1..30: mol_type = other DNA
agctcccagatgaactctctgattaaagag

SEQ ID NO: 3117 - DNA, 30 bp, synthetic construct
  source 1..30: mol_type = other DNA
agctcccagaccaactctctgattaaagag

SEQ ID NO: 3118 - DNA, 30 bp, synthetic construct
  source 1..30: mol_type = other DNA
agctcccagaacaactctctgattaaagag

SEQ ID NO: 3119 - DNA, 30 bp, synthetic construct
  source 1..30: mol_type = other DNA
agctcccagaaaaactctctgattaaagag

SEQ ID NO: 3120 - DNA, 30 bp, synthetic construct
  source 1..30: mol_type = other DNA
agctcccagagcaactctctgattaaagag

SEQ ID NO: 3121 - DNA, 30 bp, synthetic construct
  source 1..30: mol_type = other DNA
agctcccagcgtaactctctgattaaagag

SEQ ID NO: 3122 - DNA, 30 bp, synthetic construct
  source 1..30: mol_type = other DNA
agctcccagctgaactctctgattaaagag

SEQ ID NO: 3123 - DNA, 30 bp, synthetic construct
  source 1..30: mol_type = other DNA
agctcccagccgaactctctgattaaagag

SEQ ID NO: 3124 - DNA, 30 bp, synthetic construct
  source 1..30: mol_type = other DNA
agctcccagcataactctctgattaaagag

SEQ ID NO: 3125 - DNA, 30 bp, synthetic construct
  source 1..30: mol_type = other DNA
agctcccagcagaactctctgattaaagag

SEQ ID NO: 3126 - DNA, 30 bp, synthetic construct
  source 1..30: mol_type = other DNA
agctcccaggcgaactctctgattaaagag

SEQ ID NO: 3127 - DNA, 30 bp, synthetic construct
  source 1..30: mol_type = other DNA
agctcccaggataactctctgattaaagag

SEQ ID NO: 3128 - DNA, 30 bp, synthetic construct
  source 1..30: mol_type = other DNA
agctcccaggaaaactctctgattaaagag

SEQ ID NO: 3129 - DNA, 30 bp, synthetic construct
  source 1..30: mol_type = other DNA
agctcccagggcaactctctgattaaagag

SEQ ID NO: 3130 - DNA, 30 bp, synthetic construct
  source 1..30: mol_type = other DNA
agctcccagtttaactctctgattaaagag

SEQ ID NO: 3131 - DNA, 30 bp, synthetic construct
  source 1..30: mol_type = other DNA
agctcccagtataactctctgattaaagag

SEQ ID NO: 3132 - DNA, 30 bp, synthetic construct
  source 1..30: mol_type = other DNA
agctcccagtgcaactctctgattaaagag

SEQ ID NO: 3133 - DNA, 30 bp, synthetic construct
  source 1..30: mol_type = other DNA
agctcccagtggaactctctgattaaagag

SEQ ID NO: 3134 - DNA, 30 bp, synthetic construct
  source 1..30: mol_type = other DNA
agctcccaggtgatttctctgattaaagag

SEQ ID NO: 3135 - DNA, 30 bp, synthetic construct
  source 1..30: mol_type = other DNA
agctcccaggtgatgtctctgattaaagag

SEQ ID NO: 3136 - DNA, 30 bp, synthetic construct
  source 1..30: mol_type = other DNA
agctcccaggtgacctctctgattaaagag

SEQ ID NO: 3137 - DNA, 30 bp, synthetic construct
  source 1..30: mol_type = other DNA
agctcccaggtgaaatctctgattaaagag

SEQ ID NO: 3138 - DNA, 30 bp, synthetic construct
  source 1..30: mol_type = other DNA
agctcccaggtgagctctctgattaaagag

SEQ ID NO: 3139 - DNA, 30 bp, synthetic construct
  source 1..30: mol_type = other DNA
agctcccaggtgcgttctctgattaaagag

SEQ ID NO: 3140 - DNA, 30 bp, synthetic construct
  source 1..30: mol_type = other DNA
agctcccaggtgctgtctctgattaaagag

SEQ ID NO: 3141 - DNA, 30 bp, synthetic construct
  source 1..30: mol_type = other DNA
agctcccaggtgccgtctctgattaaagag

SEQ ID NO: 3142 - DNA, 30 bp, synthetic construct
  source 1..30: mol_type = other DNA
agctcccaggtgcattctctgattaaagag

SEQ ID NO: 3143 - DNA, 30 bp, synthetic construct
  source 1..30: mol_type = other DNA
agctcccaggtgcagtctctgattaaagag

SEQ ID NO: 3144 - DNA, 30 bp, synthetic construct
  source 1..30: mol_type = other DNA
agctcccaggtggtgtctctgattaaagag

SEQ ID NO: 3145 - DNA, 30 bp, synthetic construct
  source 1..30: mol_type = other DNA
agctcccaggtggcgtctctgattaaagag

SEQ ID NO: 3146 - DNA, 30 bp, synthetic construct
  source 1..30: mol_type = other DNA
agctcccaggtggattctctgattaaagag

SEQ ID NO: 3147 - DNA, 30 bp, synthetic construct
  source 1..30: mol_type = other DNA
agctcccaggtggaatctctgattaaagag

SEQ ID NO: 3148 - DNA, 30 bp, synthetic construct
  source 1..30: mol_type = other DNA
agctcccaggtgggctctctgattaaagag

SEQ ID NO: 3149 - DNA, 30 bp, synthetic construct
  source 1..30: mol_type = other DNA
agctcccaggtgttttctctgattaaagag

SEQ ID NO: 3150 - DNA, 30 bp, synthetic construct
  source 1..30: mol_type = other DNA
agctcccaggtgtattctctgattaaagag

SEQ ID NO: 3151 - DNA, 30 bp, synthetic construct
  source 1..30: mol_type = other DNA
agctcccaggtgtgctctctgattaaagag

SEQ ID NO: 3152 - DNA, 30 bp, synthetic construct
  source 1..30: mol_type = other DNA
agctcccaggtgtggtctctgattaaagag

SEQ ID NO: 3153 - DNA, 30 bp, synthetic construct
  source 1..30: mol_type = other DNA
agctcccaggtgaacattctgattaaagag

SEQ ID NO: 3154 - DNA, 30 bp, synthetic construct
  source 1..30: mol_type = other DNA
agctcccaggtgaacatgctgattaaagag

SEQ ID NO: 3155 - DNA, 30 bp, synthetic construct
  source 1..30: mol_type = other DNA
agctcccaggtgaacaccctgattaaagag

SEQ ID NO: 3156 - DNA, 30 bp, synthetic construct
  source 1..30: mol_type = other DNA
agctcccaggtgaacaacctgattaaagag

SEQ ID NO: 3157 - DNA, 30 bp, synthetic construct
  source 1..30: mol_type = other DNA
agctcccaggtgaacaaactgattaaagag

SEQ ID NO: 3158 - DNA, 30 bp, synthetic construct
  source 1..30: mol_type = other DNA
agctcccaggtgaaccgtctgattaaagag

SEQ ID NO: 3159 - DNA, 30 bp, synthetic construct
  source 1..30: mol_type = other DNA
agctcccaggtgaacctgctgattaaagag

SEQ ID NO: 3160 - DNA, 30 bp, synthetic construct
  source 1..30: mol_type = other DNA
agctcccaggtgaacccgctgattaaagag

SEQ ID NO: 3161 - DNA, 30 bp, synthetic construct
  source 1..30: mol_type = other DNA
agctcccaggtgaaccatctgattaaagag

SEQ ID NO: 3162 - DNA, 30 bp, synthetic construct
  source 1..30: mol_type = other DNA
agctcccaggtgaaccagctgattaaagag

SEQ ID NO: 3163 - DNA, 30 bp, synthetic construct
  source 1..30: mol_type = other DNA
agctcccaggtgaacgtgctgattaaagag

SEQ ID NO: 3164 - DNA, 30 bp, synthetic construct
  source 1..30: mol_type = other DNA
agctcccaggtgaacgcgctgattaaagag

SEQ ID NO: 3165 - DNA, 30 bp, synthetic construct
  source 1..30: mol_type = other DNA
agctcccaggtgaacgatctgattaaagag

SEQ ID NO: 3166 - DNA, 30 bp, synthetic construct
  source 1..30: mol_type = other DNA
agctcccaggtgaacgaactgattaaagag

SEQ ID NO: 3167 - DNA, 30 bp, synthetic construct
  source 1..30: mol_type = other DNA
agctcccaggtgaacggcctgattaaagag

SEQ ID NO: 3168 - DNA, 30 bp, synthetic construct
  source 1..30: mol_type = other DNA
agctcccaggtgaactttctgattaaagag

SEQ ID NO: 3169 - DNA, 30 bp, synthetic construct
  source 1..30: mol_type = other DNA
agctcccaggtgaactatctgattaaagag

SEQ ID NO: 3170 - DNA, 30 bp, synthetic construct
  source 1..30: mol_type = other DNA
agctcccaggtgaactgcctgattaaagag

SEQ ID NO: 3171 - DNA, 30 bp, synthetic construct
  source 1..30: mol_type = other DNA
agctcccaggtgaactggctgattaaagag

SEQ ID NO: 3172 - DNA, 30 bp, synthetic construct
  source 1..30: mol_type = other DNA
agctcccaggtgaactctattattaaagag

SEQ ID NO: 3173 - DNA, 30 bp, synthetic construct
  source 1..30: mol_type = other DNA
agctcccaggtgaactctatgattaaagag

SEQ ID NO: 3174 - DNA, 30 bp, synthetic construct
  source 1..30: mol_type = other DNA
agctcccaggtgaactctaccattaaagag

SEQ ID NO: 3175 - DNA, 30 bp, synthetic construct
  source 1..30: mol_type = other DNA
agctcccaggtgaactctaacattaaagag

SEQ ID NO: 3176 - DNA, 30 bp, synthetic construct
  source 1..30: mol_type = other DNA
agctcccaggtgaactctaaaattaaagag

SEQ ID NO: 3177 - DNA, 30 bp, synthetic construct
  source 1..30: mol_type = other DNA
agctcccaggtgaactctagcattaaagag

SEQ ID NO: 3178 - DNA, 30 bp, synthetic construct
  source 1..30: mol_type = other DNA
agctcccaggtgaactctcgtattaaagag

SEQ ID NO: 3179 - DNA, 30 bp, synthetic construct
  source 1..30: mol_type = other DNA
agctcccaggtgaactctccgattaaagag

SEQ ID NO: 3180 - DNA, 30 bp, synthetic construct
  source 1..30: mol_type = other DNA
agctcccaggtgaactctcatattaaagag

SEQ ID NO: 3181 - DNA, 30 bp, synthetic construct
  source 1..30: mol_type = other DNA
agctcccaggtgaactctcagattaaagag

SEQ ID NO: 3182 - DNA, 30 bp, synthetic construct
  source 1..30: mol_type = other DNA
agctcccaggtgaactctgtgattaaagag

SEQ ID NO: 3183 - DNA, 30 bp, synthetic construct
  source 1..30: mol_type = other DNA
agctcccaggtgaactctgcgattaaagag

SEQ ID NO: 3184 - DNA, 30 bp, synthetic construct
  source 1..30: mol_type = other DNA
agctcccaggtgaactctgatattaaagag

SEQ ID NO: 3185 - DNA, 30 bp, synthetic construct
  source 1..30: mol_type = other DNA
agctcccaggtgaactctgaaattaaagag

SEQ ID NO: 3186 - DNA, 30 bp, synthetic construct
  source 1..30: mol_type = other DNA
agctcccaggtgaactctggcattaaagag

SEQ ID NO: 3187 - DNA, 30 bp, synthetic construct
  source 1..30: mol_type = other DNA
agctcccaggtgaactcttttattaaagag

SEQ ID NO: 3188 - DNA, 30 bp, synthetic construct
  source 1..30: mol_type = other DNA
agctcccaggtgaactcttatattaaagag

SEQ ID NO: 3189 - DNA, 30 bp, synthetic construct
  source 1..30: mol_type = other DNA
agctcccaggtgaactcttgcattaaagag

SEQ ID NO: 3190 - DNA, 30 bp, synthetic construct
  source 1..30: mol_type = other DNA
agctcccaggtgaactcttggattaaagag

SEQ ID NO: 3191 - DNA, 30 bp, synthetic construct
  source 1..30: mol_type = other DNA
agctcccaggtgaactctctgatgaaagag

SEQ ID NO: 3192 - DNA, 30 bp, synthetic construct
  source 1..30: mol_type = other DNA
agctcccaggtgaactctctgaccaaagag

SEQ ID NO: 3193 - DNA, 30 bp, synthetic construct
  source 1..30: mol_type = other DNA
agctcccaggtgaactctctgaacaaagag

SEQ ID NO: 3194 - DNA, 30 bp, synthetic construct
  source 1..30: mol_type = other DNA
agctcccaggtgaactctctgaaaaaagag

SEQ ID NO: 3195 - DNA, 30 bp, synthetic construct
  source 1..30: mol_type = other DNA
agctcccaggtgaactctctgagcaaagag

SEQ ID NO: 3196 - DNA, 30 bp, synthetic construct
  source 1..30: mol_type = other DNA
agctcccaggtgaactctctgcgtaaagag

SEQ ID NO: 3197 - DNA, 30 bp, synthetic construct
  source 1..30: mol_type = other DNA
agctcccaggtgaactctctgctgaaagag

SEQ ID NO: 3198 - DNA, 30 bp, synthetic construct
  source 1..30: mol_type = other DNA
agctcccaggtgaactctctgccgaaagag

SEQ ID NO: 3199 - DNA, 30 bp, synthetic construct
  source 1..30: mol_type = other DNA
agctcccaggtgaactctctgcataaagag

SEQ ID NO: 3200 - DNA, 30 bp, synthetic construct
  source 1..30: mol_type = other DNA
agctcccaggtgaactctctgcagaaagag

SEQ ID NO: 3201 - DNA, 30 bp, synthetic construct
  source 1..30: mol_type = other DNA
agctcccaggtgaactctctggtgaaagag

SEQ ID NO: 3202 - DNA, 30 bp, synthetic construct
  source 1..30: mol_type = other DNA
agctcccaggtgaactctctggcgaaagag

SEQ ID NO: 3203 - DNA, 30 bp, synthetic construct
  source 1..30: mol_type = other DNA
agctcccaggtgaactctctggataaagag

SEQ ID NO: 3204 - DNA, 30 bp, synthetic construct
  source 1..30: mol_type = other DNA
agctcccaggtgaactctctggaaaaagag

SEQ ID NO: 3205 - DNA, 30 bp, synthetic construct
  source 1..30: mol_type = other DNA
agctcccaggtgaactctctgggcaaagag

SEQ ID NO: 3206 - DNA, 30 bp, synthetic construct
  source 1..30: mol_type = other DNA
agctcccaggtgaactctctgtttaaagag

SEQ ID NO: 3207 - DNA, 30 bp, synthetic construct
  source 1..30: mol_type = other DNA
agctcccaggtgaactctctgtataaagag

SEQ ID NO: 3208 - DNA, 30 bp, synthetic construct
  source 1..30: mol_type = other DNA
agctcccaggtgaactctctgtgcaaagag

SEQ ID NO: 3209 - DNA, 30 bp, synthetic construct
  source 1..30: mol_type = other DNA
agctcccaggtgaactctctgtggaaagag

SEQ ID NO: 3210 - DNA, 30 bp, synthetic construct
  source 1..30: mol_type = other DNA
agctcccaggtgaactctctgattattgag

SEQ ID NO: 3211 - DNA, 30 bp, synthetic construct
  source 1..30: mol_type = other DNA
agctcccaggtgaactctctgattatggag

SEQ ID NO: 3212 - DNA, 30 bp, synthetic construct
  source 1..30: mol_type = other DNA
agctcccaggtgaactctctgattaccgag

SEQ ID NO: 3213 - DNA, 30 bp, synthetic construct
  source 1..30: mol_type = other DNA
agctcccaggtgaactctctgattaacgag

SEQ ID NO: 3214 - DNA, 30 bp, synthetic construct
  source 1..30: mol_type = other DNA
agctcccaggtgaactctctgattagcgag

SEQ ID NO: 3215 - DNA, 30 bp, synthetic construct
  source 1..30: mol_type = other DNA
agctcccaggtgaactctctgattcgtgag

SEQ ID NO: 3216 - DNA, 30 bp, synthetic construct
  source 1..30: mol_type = other DNA
agctcccaggtgaactctctgattctggag

SEQ ID NO: 3217 - DNA, 30 bp, synthetic construct
  source 1..30: mol_type = other DNA
agctcccaggtgaactctctgattccggag

SEQ ID NO: 3218 - DNA, 30 bp, synthetic construct
  source 1..30: mol_type = other DNA
agctcccaggtgaactctctgattcatgag

SEQ ID NO: 3219 - DNA, 30 bp, synthetic construct
  source 1..30: mol_type = other DNA
agctcccaggtgaactctctgattcaggag

SEQ ID NO: 3220 - DNA, 30 bp, synthetic construct
  source 1..30: mol_type = other DNA
agctcccaggtgaactctctgattgtggag

SEQ ID NO: 3221 - DNA, 30 bp, synthetic construct
  source 1..30: mol_type = other DNA
agctcccaggtgaactctctgattgcggag

SEQ ID NO: 3222 - DNA, 30 bp, synthetic construct
  source 1..30: mol_type = other DNA
agctcccaggtgaactctctgattgatgag

SEQ ID NO: 3223 - DNA, 30 bp, synthetic construct
  source 1..30: mol_type = other DNA
agctcccaggtgaactctctgattgaagag

SEQ ID NO: 3224 - DNA, 30 bp, synthetic construct
  source 1..30: mol_type = other DNA
agctcccaggtgaactctctgattggcgag

SEQ ID NO: 3225 - DNA, 30 bp, synthetic construct
  source 1..30: mol_type = other DNA
agctcccaggtgaactctctgatttttgag

SEQ ID NO: 3226 - DNA, 30 bp, synthetic construct
  source 1..30: mol_type = other DNA
agctcccaggtgaactctctgatttatgag

SEQ ID NO: 3227 - DNA, 30 bp, synthetic construct
  source 1..30: mol_type = other DNA
agctcccaggtgaactctctgatttgcgag

SEQ ID NO: 3228 - DNA, 30 bp, synthetic construct
  source 1..30: mol_type = other DNA
agctcccaggtgaactctctgatttgggag

SEQ ID NO: 3229 - DNA, 30 bp, synthetic construct
  source 1..30: mol_type = other DNA
agctcccaggtgaactctctgattaaaatt

SEQ ID NO: 3230 - DNA, 30 bp, synthetic construct
  source 1..30: mol_type = other DNA
agctcccaggtgaactctctgattaaaatg

SEQ ID NO: 3231 - DNA, 30 bp, synthetic construct
  source 1..30: mol_type = other DNA
agctcccaggtgaactctctgattaaaacc

SEQ ID NO: 3232 - DNA, 30 bp, synthetic construct
  source 1..30: mol_type = other DNA
agctcccaggtgaactctctgattaaaaac

SEQ ID NO: 3233 - DNA, 30 bp, synthetic construct
  source 1..30: mol_type = other DNA
agctcccaggtgaactctctgattaaaaaa

SEQ ID NO: 3234 - DNA, 30 bp, synthetic construct
  source 1..30: mol_type = other DNA
agctcccaggtgaactctctgattaaaagc

SEQ ID NO: 3235 - DNA, 30 bp, synthetic construct
  source 1..30: mol_type = other DNA
agctcccaggtgaactctctgattaaacgt

SEQ ID NO: 3236 - DNA, 30 bp, synthetic construct
  source 1..30: mol_type = other DNA
agctcccaggtgaactctctgattaaactg

SEQ ID NO: 3237 - DNA, 30 bp, synthetic construct
  source 1..30: mol_type = other DNA
agctcccaggtgaactctctgattaaaccg

SEQ ID NO: 3238 - DNA, 30 bp, synthetic construct
  source 1..30: mol_type = other DNA
agctcccaggtgaactctctgattaaacat

SEQ ID NO: 3239 - DNA, 30 bp, synthetic construct
  source 1..30: mol_type = other DNA
agctcccaggtgaactctctgattaaacag

SEQ ID NO: 3240 - DNA, 30 bp, synthetic construct
  source 1..30: mol_type = other DNA
agctcccaggtgaactctctgattaaagtg

SEQ ID NO: 3241 - DNA, 30 bp, synthetic construct
  source 1..30: mol_type = other DNA
agctcccaggtgaactctctgattaaagcg

SEQ ID NO: 3242 - DNA, 30 bp, synthetic construct
  source 1..30: mol_type = other DNA
agctcccaggtgaactctctgattaaagat

SEQ ID NO: 3243 - DNA, 30 bp, synthetic construct
  source 1..30: mol_type = other DNA
agctcccaggtgaactctctgattaaaggc

SEQ ID NO: 3244 - DNA, 30 bp, synthetic construct
  source 1..30: mol_type = other DNA
agctcccaggtgaactctctgattaaattt

SEQ ID NO: 3245 - DNA, 30 bp, synthetic construct
  source 1..30: mol_type = other DNA
agctcccaggtgaactctctgattaaatat

SEQ ID NO: 3246 - DNA, 30 bp, synthetic construct
  source 1..30: mol_type = other DNA
agctcccaggtgaactctctgattaaatgc

SEQ ID NO: 3247 - DNA, 30 bp, synthetic construct
  source 1..30: mol_type = other DNA
agctcccaggtgaactctctgattaaatgg

SEQ ID NO: 3248 - DNA, 30 bp, Bacillus subtilis
  source 1..30: mol_type = genomic DNA
ggtctgaacggcggtggccagaacactaac

SEQ ID NO: 3249 - DNA, 30 bp, synthetic construct
  source 1..30: mol_type = other DNA
attctgaacggcggtggccagaacactaac

SEQ ID NO: 3250 - DNA, 30 bp, synthetic construct
  source 1..30: mol_type = other DNA
atgctgaacggcggtggccagaacactaac

SEQ ID NO: 3251 - DNA, 30 bp, synthetic construct
  source 1..30: mol_type = other DNA
accctgaacggcggtggccagaacactaac

SEQ ID NO: 3252 - DNA, 30 bp, synthetic construct
  source 1..30: mol_type = other DNA
aacctgaacggcggtggccagaacactaac

SEQ ID NO: 3253 - DNA, 30 bp, synthetic construct
  source 1..30: mol_type = other DNA
aaactgaacggcggtggccagaacactaac

SEQ ID NO: 3254 - DNA, 30 bp, synthetic construct
  source 1..30: mol_type = other DNA
agcctgaacggcggtggccagaacactaac

SEQ ID NO: 3255 - DNA, 30 bp, synthetic construct
  source 1..30: mol_type = other DNA
cgtctgaacggcggtggccagaacactaac

SEQ ID NO: 3256 - DNA, 30 bp, synthetic construct
  source 1..30: mol_type = other DNA
ctgctgaacggcggtggccagaacactaac

SEQ ID NO: 3257 - DNA, 30 bp, synthetic construct
  source 1..30: mol_type = other DNA
ccgctgaacggcggtggccagaacactaac

SEQ ID NO: 3258 - DNA, 30 bp, synthetic construct
  source 1..30: mol_type = other DNA
catctgaacggcggtggccagaacactaac

SEQ ID NO: 3259 - DNA, 30 bp, synthetic construct
  source 1..30: mol_type = other DNA
cagctgaacggcggtggccagaacactaac

SEQ ID NO: 3260 - DNA, 30 bp, synthetic construct
  source 1..30: mol_type = other DNA
gtgctgaacggcggtggccagaacactaac

SEQ ID NO: 3261 - DNA, 30 bp, synthetic construct
  source 1..30: mol_type = other DNA
gcgctgaacggcggtggccagaacactaac

SEQ ID NO: 3262 - DNA, 30 bp, synthetic construct
  source 1..30: mol_type = other DNA
gatctgaacggcggtggccagaacactaac

SEQ ID NO: 3263 - DNA, 30 bp, synthetic construct
  source 1..30: mol_type = other DNA
gaactgaacggcggtggccagaacactaac

SEQ ID NO: 3264 - DNA, 30 bp, synthetic construct
  source 1..30: mol_type = other DNA
tttctgaacggcggtggccagaacactaac

SEQ ID NO: 3265 - DNA, 30 bp, synthetic construct
  source 1..30: mol_type = other DNA
tatctgaacggcggtggccagaacactaac

SEQ ID NO: 3266 - DNA, 30 bp, synthetic construct
  source 1..30: mol_type = other DNA
tgcctgaacggcggtggccagaacactaac

SEQ ID NO: 3267 - DNA, 30 bp, synthetic construct
  source 1..30: mol_type = other DNA
tggctgaacggcggtggccagaacactaac

SEQ ID NO: 3268 - DNA, 30 bp, synthetic construct
  source 1..30: mol_type = other DNA
ggtattaacggcggtggccagaacactaac

SEQ ID NO: 3269 - DNA, 30 bp, synthetic construct
  source 1..30: mol_type = other DNA
ggtatgaacggcggtggccagaacactaac

SEQ ID NO: 3270 - DNA, 30 bp, synthetic construct
  source 1..30: mol_type = other DNA
ggtaccaacggcggtggccagaacactaac

SEQ ID NO: 3271 - DNA, 30 bp, synthetic construct
  source 1..30: mol_type = other DNA
ggtaacaacggcggtggccagaacactaac

SEQ ID NO: 3272 - DNA, 30 bp, synthetic construct
  source 1..30: mol_type = other DNA
ggtaaaaacggcggtggccagaacactaac

SEQ ID NO: 3273 - DNA, 30 bp, synthetic construct
  source 1..30: mol_type = other DNA
ggtagcaacggcggtggccagaacactaac

SEQ ID NO: 3274 - DNA, 30 bp, synthetic construct
  source 1..30: mol_type = other DNA
ggtcgtaacggcggtggccagaacactaac

SEQ ID NO: 3275 - DNA, 30 bp, synthetic construct
  source 1..30: mol_type = other DNA
ggtccgaacggcggtggccagaacactaac

SEQ ID NO: 3276 - DNA, 30 bp, synthetic construct
  source 1..30: mol_type = other DNA
ggtcataacggcggtggccagaacactaac

SEQ ID NO: 3277 - DNA, 30 bp, synthetic construct
  source 1..30: mol_type = other DNA
ggtcagaacggcggtggccagaacactaac

SEQ ID NO: 3278 - DNA, 30 bp, synthetic construct
  source 1..30: mol_type = other DNA
ggtgtgaacggcggtggccagaacactaac

SEQ ID NO: 3279 - DNA, 30 bp, synthetic construct
  source 1..30: mol_type = other DNA
ggtgcgaacggcggtggccagaacactaac

SEQ ID NO: 3280 - DNA, 30 bp, synthetic construct
  source 1..30: mol_type = other DNA
ggtgataacggcggtggccagaacactaac

SEQ ID NO: 3281 - DNA, 30 bp, synthetic construct
  source 1..30: mol_type = other DNA
ggtgaaaacggcggtggccagaacactaac

SEQ ID NO: 3282 - DNA, 30 bp, synthetic construct
  source 1..30: mol_type = other DNA
ggtggcaacggcggtggccagaacactaac

SEQ ID NO: 3283 - DNA, 30 bp, synthetic construct
  source 1..30: mol_type = other DNA
ggttttaacggcggtggccagaacactaac

SEQ ID NO: 3284 - DNA, 30 bp, synthetic construct
  source 1..30: mol_type = other DNA
ggttataacggcggtggccagaacactaac

SEQ ID NO: 3285 - DNA, 30 bp, synthetic construct
  source 1..30: mol_type = other DNA
ggttgcaacggcggtggccagaacactaac

SEQ ID NO: 3286 - DNA, 30 bp, synthetic construct
  source 1..30: mol_type = other DNA
ggttggaacggcggtggccagaacactaac

SEQ ID NO: 3287 - DNA, 30 bp, synthetic construct
  source 1..30: mol_type = other DNA
ggtctgattggcggtggccagaacactaac

SEQ ID NO: 3288 - DNA, 30 bp, synthetic construct
  source 1..30: mol_type = other DNA
ggtctgatgggcggtggccagaacactaac

SEQ ID NO: 3289 - DNA, 30 bp, synthetic construct
  source 1..30: mol_type = other DNA
ggtctgaccggcggtggccagaacactaac

SEQ ID NO: 3290 - DNA, 30 bp, synthetic construct
  source 1..30: mol_type = other DNA
ggtctgaaaggcggtggccagaacactaac

SEQ ID NO: 3291 - DNA, 30 bp, synthetic construct
  source 1..30: mol_type = other DNA
ggtctgagcggcggtggccagaacactaac

SEQ ID NO: 3292 - DNA, 30 bp, synthetic construct
  source 1..30: mol_type = other DNA
ggtctgcgtggcggtggccagaacactaac

SEQ ID NO: 3293 - DNA, 30 bp, synthetic construct
  source 1..30: mol_type = other DNA
ggtctgctgggcggtggccagaacactaac

SEQ ID NO: 3294 - DNA, 30 bp, synthetic construct
  source 1..30: mol_type = other DNA
ggtctgccgggcggtggccagaacactaac

SEQ ID NO: 3295 - DNA, 30 bp, synthetic construct
  source 1..30: mol_type = other DNA
ggtctgcatggcggtggccagaacactaac

SEQ ID NO: 3296 - DNA, 30 bp, synthetic construct
  source 1..30: mol_type = other DNA
ggtctgcagggcggtggccagaacactaac

SEQ ID NO: 3297 - DNA, 30 bp, synthetic construct
  source 1..30: mol_type = other DNA
ggtctggtgggcggtggccagaacactaac

SEQ ID NO: 3298 - DNA, 30 bp, synthetic construct
  source 1..30: mol_type = other DNA
ggtctggcgggcggtggccagaacactaac

SEQ ID NO: 3299 - DNA, 30 bp, synthetic construct
  source 1..30: mol_type = other DNA
ggtctggatggcggtggccagaacactaac

SEQ ID NO: 3300 - DNA, 30 bp, synthetic construct
  source 1..30: mol_type = other DNA
ggtctggaaggcggtggccagaacactaac

SEQ ID NO: 3301 - DNA, 30 bp, synthetic construct
  source 1..30: mol_type = other DNA
ggtctgggcggcggtggccagaacactaac

SEQ ID NO: 3302 - DNA, 30 bp, synthetic construct
  source 1..30: mol_type = other DNA
ggtctgtttggcggtggccagaacactaac

SEQ ID NO: 3303 - DNA, 30 bp, synthetic construct
  source 1..30: mol_type = other DNA
ggtctgtatggcggtggccagaacactaac

SEQ ID NO: 3304 - DNA, 30 bp, synthetic construct
  source 1..30: mol_type = other DNA
ggtctgtgcggcggtggccagaacactaac

SEQ ID NO: 3305 - DNA, 30 bp, synthetic construct
  source 1..30: mol_type = other DNA
ggtctgtggggcggtggccagaacactaac

SEQ ID NO: 3306 - DNA, 30 bp, synthetic construct
  source 1..30: mol_type = other DNA
ggtctgaacattggtggccagaacactaac

SEQ ID NO: 3307 - DNA, 30 bp, synthetic construct
  source 1..30: mol_type = other DNA
ggtctgaacatgggtggccagaacactaac

SEQ ID NO: 3308 - DNA, 30 bp, synthetic construct
  source 1..30: mol_type = other DNA
ggtctgaacaccggtggccagaacactaac

SEQ ID NO: 3309 - DNA, 30 bp, synthetic construct
  source 1..30: mol_type = other DNA
ggtctgaacaacggtggccagaacactaac

SEQ ID NO: 3310 - DNA, 30 bp, synthetic construct
  source 1..30: mol_type = other DNA
ggtctgaacaaaggtggccagaacactaac

SEQ ID NO: 3311 - DNA, 30 bp, synthetic construct
  source 1..30: mol_type = other DNA
ggtctgaacagcggtggccagaacactaac

SEQ ID NO: 3312 - DNA, 30 bp, synthetic construct
  source 1..30: mol_type = other DNA
ggtctgaaccgtggtggccagaacactaac

SEQ ID NO: 3313 - DNA, 30 bp, synthetic construct
  source 1..30: mol_type = other DNA
ggtctgaacctgggtggccagaacactaac

SEQ ID NO: 3314 - DNA, 30 bp, synthetic construct
  source 1..30: mol_type = other DNA
ggtctgaacccgggtggccagaacactaac

SEQ ID NO: 3315 - DNA, 30 bp, synthetic construct
  source 1..30: mol_type = other DNA
ggtctgaaccatggtggccagaacactaac

SEQ ID NO: 3316 - DNA, 30 bp, synthetic construct
  source 1..30: mol_type = other DNA
ggtctgaaccagggtggccagaacactaac

SEQ ID NO: 3317 - DNA, 30 bp, synthetic construct
  source 1..30: mol_type = other DNA
ggtctgaacgtgggtggccagaacactaac

SEQ ID NO: 3318 - DNA, 30 bp, synthetic construct
  source 1..30: mol_type = other DNA
ggtctgaacgcgggtggccagaacactaac

SEQ ID NO: 3319 - DNA, 30 bp, synthetic construct
  source 1..30: mol_type = other DNA
ggtctgaacgatggtggccagaacactaac

SEQ ID NO: 3320 - DNA, 30 bp, synthetic construct
  source 1..30: mol_type = other DNA
ggtctgaacgaaggtggccagaacactaac

SEQ ID NO: 3321 - DNA, 30 bp, synthetic construct
  source 1..30: mol_type = other DNA
ggtctgaactttggtggccagaacactaac

SEQ ID NO: 3322 - DNA, 30 bp, synthetic construct
  source 1..30: mol_type = other DNA
ggtctgaactatggtggccagaacactaac

SEQ ID NO: 3323 - DNA, 30 bp, synthetic construct
  source 1..30: mol_type = other DNA
ggtctgaactgcggtggccagaacactaac

SEQ ID NO: 3324 - DNA, 30 bp, synthetic construct
  source 1..30: mol_type = other DNA
ggtctgaactggggtggccagaacactaac

SEQ ID NO: 3325 - DNA, 30 bp, synthetic construct
  source 1..30: mol_type = other DNA
ggtctgaacggcattggccagaacactaac

SEQ ID NO: 3326 - DNA, 30 bp, synthetic construct
  source 1..30: mol_type = other DNA
ggtctgaacggcatgggccagaacactaac

SEQ ID NO: 3327 - DNA, 30 bp, synthetic construct
  source 1..30: mol_type = other DNA
ggtctgaacggcaccggccagaacactaac

SEQ ID NO: 3328 - DNA, 30 bp, synthetic construct
  source 1..30: mol_type = other DNA
ggtctgaacggcaacggccagaacactaac

SEQ ID NO: 3329 - DNA, 30 bp, synthetic construct
  source 1..30: mol_type = other DNA
ggtctgaacggcaaaggccagaacactaac

SEQ ID NO: 3330 - DNA, 30 bp, synthetic construct
  source 1..30: mol_type = other DNA
ggtctgaacggcagcggccagaacactaac

SEQ ID NO: 3331 - DNA, 30 bp, synthetic construct
  source 1..30: mol_type = other DNA
ggtctgaacggccgtggccagaacactaac

SEQ ID NO: 3332 - DNA, 30 bp, synthetic construct
  source 1..30: mol_type = other DNA
ggtctgaacggcctgggccagaacactaac

SEQ ID NO: 3333 - DNA, 30 bp, synthetic construct
  source 1..30: mol_type = other DNA
ggtctgaacggcccgggccagaacactaac

SEQ ID NO: 3334 - DNA, 30 bp, synthetic construct
  source 1..30: mol_type = other DNA
ggtctgaacggccatggccagaacactaac

SEQ ID NO: 3335 - DNA, 30 bp, synthetic construct
  source 1..30: mol_type = other DNA
ggtctgaacggccagggccagaacactaac

SEQ ID NO: 3336 - DNA, 30 bp, synthetic construct
  source 1..30: mol_type = other DNA
ggtctgaacggcgtgggccagaacactaac

SEQ ID NO: 3337 - DNA, 30 bp, synthetic construct
  source 1..30: mol_type = other DNA
ggtctgaacggcgcgggccagaacactaac

SEQ ID NO: 3338 - DNA, 30 bp, synthetic construct
  source 1..30: mol_type = other DNA
ggtctgaacggcgatggccagaacactaac

SEQ ID NO: 3339 - DNA, 30 bp, synthetic construct
  source 1..30: mol_type = other DNA
ggtctgaacggcgaaggccagaacactaac

SEQ ID NO: 3340 - DNA, 30 bp, synthetic construct
  source 1..30: mol_type = other DNA
ggtctgaacggctttggccagaacactaac

SEQ ID NO: 3341 - DNA, 30 bp, synthetic construct
  source 1..30: mol_type = other DNA
ggtctgaacggctatggccagaacactaac

SEQ ID NO: 3342 - DNA, 30 bp, synthetic construct
  source 1..30: mol_type = other DNA
ggtctgaacggctgcggccagaacactaac

SEQ ID NO: 3343 - DNA, 30 bp, synthetic construct
  source 1..30: mol_type = other DNA
ggtctgaacggctggggccagaacactaac

SEQ ID NO: 3344 - DNA, 30 bp, synthetic construct
  source 1..30: mol_type = other DNA
ggtctgaacggcggtattcagaacactaac

SEQ ID NO: 3345 - DNA, 30 bp, synthetic construct
  source 1..30: mol_type = other DNA
ggtctgaacggcggtatgcagaacactaac

SEQ ID NO: 3346 - DNA, 30 bp, synthetic construct
  source 1..30: mol_type = other DNA
ggtctgaacggcggtacccagaacactaac

SEQ ID NO: 3347 - DNA, 30 bp, synthetic construct
  source 1..30: mol_type = other DNA
ggtctgaacggcggtaaccagaacactaac

SEQ ID NO: 3348 - DNA, 30 bp, synthetic construct
  source 1..30: mol_type = other DNA
ggtctgaacggcggtaaacagaacactaac

SEQ ID NO: 3349 - DNA, 30 bp, synthetic construct
  source 1..30: mol_type = other DNA
ggtctgaacggcggtagccagaacactaac

SEQ ID NO: 3350 - DNA, 30 bp, synthetic construct
  source 1..30: mol_type = other DNA
ggtctgaacggcggtcgtcagaacactaac

SEQ ID NO: 3351 - DNA, 30 bp, synthetic construct
  source 1..30: mol_type = other DNA
ggtctgaacggcggtctgcagaacactaac

SEQ ID NO: 3352 - DNA, 30 bp, synthetic construct
  source 1..30: mol_type = other DNA
ggtctgaacggcggtccgcagaacactaac

SEQ ID NO: 3353 - DNA, 30 bp, synthetic construct
  source 1..30: mol_type = other DNA
ggtctgaacggcggtcatcagaacactaac

SEQ ID NO: 3354 - DNA, 30 bp, synthetic construct
  source 1..30: mol_type = other DNA
ggtctgaacggcggtcagcagaacactaac

SEQ ID NO: 3355 - DNA, 30 bp, synthetic construct
  source 1..30: mol_type = other DNA
ggtctgaacggcggtgtgcagaacactaac

SEQ ID NO: 3356 - DNA, 30 bp, synthetic construct
  source 1..30: mol_type = other DNA
ggtctgaacggcggtgcgcagaacactaac

SEQ ID NO: 3357 - DNA, 30 bp, synthetic construct
  source 1..30: mol_type = other DNA
ggtctgaacggcggtgatcagaacactaac

SEQ ID NO: 3358 - DNA, 30 bp, synthetic construct
  source 1..30: mol_type = other DNA
ggtctgaacggcggtgaacagaacactaac

SEQ ID NO: 3359 - DNA, 30 bp, synthetic construct
  source 1..30: mol_type = other DNA
ggtctgaacggcggttttcagaacactaac

SEQ ID NO: 3360 - DNA, 30 bp, synthetic construct
  source 1..30: mol_type = other DNA
ggtctgaacggcggttatcagaacactaac

SEQ ID NO: 3361 - DNA, 30 bp, synthetic construct
  source 1..30: mol_type = other DNA
ggtctgaacggcggttgccagaacactaac

SEQ ID NO: 3362 - DNA, 30 bp, synthetic construct
  source 1..30: mol_type = other DNA
ggtctgaacggcggttggcagaacactaac

SEQ ID NO: 3363 - DNA, 30 bp, synthetic construct
  source 1..30: mol_type = other DNA
ggtctgaacggcggtggcattaacactaac

SEQ ID NO: 3364 - DNA, 30 bp, synthetic construct
  source 1..30: mol_type = other DNA
ggtctgaacggcggtggcatgaacactaac

SEQ ID NO: 3365 - DNA, 30 bp, synthetic construct
  source 1..30: mol_type = other DNA
ggtctgaacggcggtggcaccaacactaac

SEQ ID NO: 3366 - DNA, 30 bp, synthetic construct
  source 1..30: mol_type = other DNA
ggtctgaacggcggtggcaacaacactaac

SEQ ID NO: 3367 - DNA, 30 bp, synthetic construct
  source 1..30: mol_type = other DNA
ggtctgaacggcggtggcaaaaacactaac

SEQ ID NO: 3368 - DNA, 30 bp, synthetic construct
  source 1..30: mol_type = other DNA
ggtctgaacggcggtggcagcaacactaac

SEQ ID NO: 3369 - DNA, 30 bp, synthetic construct
  source 1..30: mol_type = other DNA
ggtctgaacggcggtggccgtaacactaac

SEQ ID NO: 3370 - DNA, 30 bp, synthetic construct
  source 1..30: mol_type = other DNA
ggtctgaacggcggtggcctgaacactaac

SEQ ID NO: 3371 - DNA, 30 bp, synthetic construct
  source 1..30: mol_type = other DNA
ggtctgaacggcggtggcccgaacactaac

SEQ ID NO: 3372 - DNA, 30 bp, synthetic construct
  source 1..30: mol_type = other DNA
ggtctgaacggcggtggccataacactaac

SEQ ID NO: 3373 - DNA, 30 bp, synthetic construct
  source 1..30: mol_type = other DNA
ggtctgaacggcggtggcgtgaacactaac

SEQ ID NO: 3374 - DNA, 30 bp, synthetic construct
  source 1..30: mol_type = other DNA
ggtctgaacggcggtggcgcgaacactaac

SEQ ID NO: 3375 - DNA, 30 bp, synthetic construct
  source 1..30: mol_type = other DNA
ggtctgaacggcggtggcgataacactaac

SEQ ID NO: 3376 - DNA, 30 bp, synthetic construct
  source 1..30: mol_type = other DNA
ggtctgaacggcggtggcgaaaacactaac

SEQ ID NO: 3377 - DNA, 30 bp, synthetic construct
  source 1..30: mol_type = other DNA
ggtctgaacggcggtggcggcaacactaac

SEQ ID NO: 3378 - DNA, 30 bp, synthetic construct
  source 1..30: mol_type = other DNA
ggtctgaacggcggtggctttaacactaac

SEQ ID NO: 3379 - DNA, 30 bp, synthetic construct
  source 1..30: mol_type = other DNA
ggtctgaacggcggtggctataacactaac

SEQ ID NO: 3380 - DNA, 30 bp, synthetic construct
  source 1..30: mol_type = other DNA
ggtctgaacggcggtggctgcaacactaac

SEQ ID NO: 3381 - DNA, 30 bp, synthetic construct
  source 1..30: mol_type = other DNA
ggtctgaacggcggtggctggaacactaac

SEQ ID NO: 3382 - DNA, 30 bp, synthetic construct
  source 1..30: mol_type = other DNA
ggtctgaacggcggtggccagattactaac

SEQ ID NO: 3383 - DNA, 30 bp, synthetic construct
  source 1..30: mol_type = other DNA
ggtctgaacggcggtggccagatgactaac

SEQ ID NO: 3384 - DNA, 30 bp, synthetic construct
  source 1..30: mol_type = other DNA
ggtctgaacggcggtggccagaccactaac

SEQ ID NO: 3385 - DNA, 30 bp, synthetic construct
  source 1..30: mol_type = other DNA
ggtctgaacggcggtggccagaaaactaac

SEQ ID NO: 3386 - DNA, 30 bp, synthetic construct
  source 1..30: mol_type = other DNA
ggtctgaacggcggtggccagagcactaac

SEQ ID NO: 3387 - DNA, 30 bp, synthetic construct
  source 1..30: mol_type = other DNA
ggtctgaacggcggtggccagcgtactaac

SEQ ID NO: 3388 - DNA, 30 bp, synthetic construct
  source 1..30: mol_type = other DNA
ggtctgaacggcggtggccagctgactaac

SEQ ID NO: 3389 - DNA, 30 bp, synthetic construct
  source 1..30: mol_type = other DNA
ggtctgaacggcggtggccagccgactaac

SEQ ID NO: 3390 - DNA, 30 bp, synthetic construct
  source 1..30: mol_type = other DNA
ggtctgaacggcggtggccagcatactaac

SEQ ID NO: 3391 - DNA, 30 bp, synthetic construct
  source 1..30: mol_type = other DNA
ggtctgaacggcggtggccagcagactaac

SEQ ID NO: 3392 - DNA, 30 bp, synthetic construct
  source 1..30: mol_type = other DNA
ggtctgaacggcggtggccaggtgactaac

SEQ ID NO: 3393 - DNA, 30 bp, synthetic construct
  source 1..30: mol_type = other DNA
ggtctgaacggcggtggccaggcgactaac

SEQ ID NO: 3394 - DNA, 30 bp, synthetic construct
  source 1..30: mol_type = other DNA
ggtctgaacggcggtggccaggatactaac

SEQ ID NO: 3395 - DNA, 30 bp, synthetic construct
  source 1..30: mol_type = other DNA
ggtctgaacggcggtggccaggaaactaac

SEQ ID NO: 3396 - DNA, 30 bp, synthetic construct
  source 1..30: mol_type = other DNA
ggtctgaacggcggtggccagggcactaac

SEQ ID NO: 3397 - DNA, 30 bp, synthetic construct
  source 1..30: mol_type = other DNA
ggtctgaacggcggtggccagtttactaac

SEQ ID NO: 3398 - DNA, 30 bp, synthetic construct
  source 1..30: mol_type = other DNA
ggtctgaacggcggtggccagtatactaac

SEQ ID NO: 3399 - DNA, 30 bp, synthetic construct
  source 1..30: mol_type = other DNA
ggtctgaacggcggtggccagtgcactaac

SEQ ID NO: 3400 - DNA, 30 bp, synthetic construct
  source 1..30: mol_type = other DNA
ggtctgaacggcggtggccagtggactaac

SEQ ID NO: 3401 - DNA, 30 bp, synthetic construct
  source 1..30: mol_type = other DNA
ggtctgaacggcggtggccagaacattaac

SEQ ID NO: 3402 - DNA, 30 bp, synthetic construct
  source 1..30: mol_type = other DNA
ggtctgaacggcggtggccagaacatgaac

SEQ ID NO: 3403 - DNA, 30 bp, synthetic construct
  source 1..30: mol_type = other DNA
ggtctgaacggcggtggccagaacaacaac

SEQ ID NO: 3404 - DNA, 30 bp, synthetic construct
  source 1..30: mol_type = other DNA
ggtctgaacggcggtggccagaacaaaaac

SEQ ID NO: 3405 - DNA, 30 bp, synthetic construct
  source 1..30: mol_type = other DNA
ggtctgaacggcggtggccagaacagcaac

SEQ ID NO: 3406 - DNA, 30 bp, synthetic construct
  source 1..30: mol_type = other DNA
ggtctgaacggcggtggccagaaccgtaac

SEQ ID NO: 3407 - DNA, 30 bp, synthetic construct
  source 1..30: mol_type = other DNA
ggtctgaacggcggtggccagaacctgaac

SEQ ID NO: 3408 - DNA, 30 bp, synthetic construct
  source 1..30: mol_type = other DNA
ggtctgaacggcggtggccagaacccgaac

SEQ ID NO: 3409 - DNA, 30 bp, synthetic construct
  source 1..30: mol_type = other DNA
ggtctgaacggcggtggccagaaccataac

SEQ ID NO: 3410 - DNA, 30 bp, synthetic construct
  source 1..30: mol_type = other DNA
ggtctgaacggcggtggccagaaccagaac

SEQ ID NO: 3411 - DNA, 30 bp, synthetic construct
  source 1..30: mol_type = other DNA
ggtctgaacggcggtggccagaacgtgaac

SEQ ID NO: 3412 - DNA, 30 bp, synthetic construct
  source 1..30: mol_type = other DNA
ggtctgaacggcggtggccagaacgcgaac

SEQ ID NO: 3413 - DNA, 30 bp, synthetic construct
  source 1..30: mol_type = other DNA
ggtctgaacggcggtggccagaacgataac

SEQ ID NO: 3414 - DNA, 30 bp, synthetic construct
  source 1..30: mol_type = other DNA
ggtctgaacggcggtggccagaacgaaaac

SEQ ID NO: 3415 - DNA, 30 bp, synthetic construct
  source 1..30: mol_type = other DNA
ggtctgaacggcggtggccagaacggcaac

SEQ ID NO: 3416 - DNA, 30 bp, synthetic construct
  source 1..30: mol_type = other DNA
ggtctgaacggcggtggccagaactttaac

SEQ ID NO: 3417 - DNA, 30 bp, synthetic construct
  source 1..30: mol_type = other DNA
ggtctgaacggcggtggccagaactataac

SEQ ID NO: 3418 - DNA, 30 bp, synthetic construct
  source 1..30: mol_type = other DNA
ggtctgaacggcggtggccagaactgcaac

SEQ ID NO: 3419 - DNA, 30 bp, synthetic construct
  source 1..30: mol_type = other DNA
ggtctgaacggcggtggccagaactggaac

SEQ ID NO: 3420 - DNA, 30 bp, synthetic construct
  source 1..30: mol_type = other DNA
ggtctgaacggcggtggccagaacactatt

SEQ ID NO: 3421 - DNA, 30 bp, synthetic construct
  source 1..30: mol_type = other DNA
ggtctgaacggcggtggccagaacactatg

SEQ ID NO: 3422 - DNA, 30 bp, synthetic construct
  source 1..30: mol_type = other DNA
ggtctgaacggcggtggccagaacactacc

SEQ ID NO: 3423 - DNA, 30 bp, synthetic construct
  source 1..30: mol_type = other DNA
ggtctgaacggcggtggccagaacactaaa

SEQ ID NO: 3424 - DNA, 30 bp, synthetic construct
  source 1..30: mol_type = other DNA
ggtctgaacggcggtggccagaacactagc

SEQ ID NO: 3425 - DNA, 30 bp, synthetic construct
  source 1..30: mol_type = other DNA
ggtctgaacggcggtggccagaacactcgt

SEQ ID NO: 3426 - DNA, 30 bp, synthetic construct
  source 1..30: mol_type = other DNA
ggtctgaacggcggtggccagaacactctg

SEQ ID NO: 3427 - DNA, 30 bp, synthetic construct
  source 1..30: mol_type = other DNA
ggtctgaacggcggtggccagaacactccg

SEQ ID NO: 3428 - DNA, 30 bp, synthetic construct
  source 1..30: mol_type = other DNA
ggtctgaacggcggtggccagaacactcat

SEQ ID NO: 3429 - DNA, 30 bp, synthetic construct
  source 1..30: mol_type = other DNA
ggtctgaacggcggtggccagaacactcag

SEQ ID NO: 3430 - DNA, 30 bp, synthetic construct
  source 1..30: mol_type = other DNA
ggtctgaacggcggtggccagaacactgtg

SEQ ID NO: 3431 - DNA, 30 bp, synthetic construct
  source 1..30: mol_type = other DNA
ggtctgaacggcggtggccagaacactgcg

SEQ ID NO: 3432 - DNA, 30 bp, synthetic construct
  source 1..30: mol_type = other DNA
ggtctgaacggcggtggccagaacactgat

SEQ ID NO: 3433 - DNA, 30 bp, synthetic construct
  source 1..30: mol_type = other DNA
ggtctgaacggcggtggccagaacactgaa

SEQ ID NO: 3434 - DNA, 30 bp, synthetic construct
  source 1..30: mol_type = other DNA
ggtctgaacggcggtggccagaacactggc

SEQ ID NO: 3435 - DNA, 30 bp, synthetic construct
  source 1..30: mol_type = other DNA
ggtctgaacggcggtggccagaacactttt

SEQ ID NO: 3436 - DNA, 30 bp, synthetic construct
  source 1..30: mol_type = other DNA
ggtctgaacggcggtggccagaacacttat

SEQ ID NO: 3437 - DNA, 30 bp, synthetic construct
  source 1..30: mol_type = other DNA
ggtctgaacggcggtggccagaacacttgc

SEQ ID NO: 3438 - DNA, 30 bp, synthetic construct
  source 1..30: mol_type = other DNA
ggtctgaacggcggtggccagaacacttgg

SEQ ID NO: 3439 - protein, 181 aa, Bacillus subtilis
MEHNPVVMVHGIGGASFNFAGIKSYLVSQGWSRDKLYAVDFWDKTGTNYNNGPVLSRFVQKVLDETGAKKVDIVAHSMGGANTLYYIKNLDGGNKVANVVTLGGANRLTTGKALPGTDPNQKILYTSIYSSADMIVMNYLSRLDGARNVQIHGVGHIGLLYSSQVNSLIKEGLNGGGQNTN

SEQ ID NO: 3440 - DNA, 543 bp, Bacillus subtilis
  source 1..543: mol_type = genomic DNA
atggaacacaacccggttgtaatggttcatggtattggcggtgccagcttcaactttgcgggcatcaaatcttatctggtatcccagggctggtcccgtgataaactgtacgcagtagacttctgggacaagaccggcaccaactacaataacggcccggttctgagccgttttgtccagaaagtgctggacgaaactggtgctaaaaaggtggacatcgttgctcacagcatgggtggcgcgaacactctgtattacatcaaaaacctggacggtggcaacaaggtagcgaacgttgtaactctgggtggcgctaaccgtctgaccactggtaaagcgctgccgggcacggacccgaaccaaaaaatcctgtacacttccatctactcttccgcggacatgatcgttatgaattacctgtcccgtctggatggcgctcgtaatgtacagatccacggtgtcggccacatcggtctgctgtacagctcccaggtgaactctctgattaaagagggtctgaacggcggtggccagaacactaac